United States Patent Application Publication US 2015/0086982 A1 - sequence listing, part 6

SEQ ID NO: 105 - DNA, 6387817 bp, Penicillium chrysogenum (residues 2,129,274-4,258,546 of 6,387,817)
  misc_feature (318994)..(319093): n is a, c, g, or t
  misc_feature (839421)..(839520): n is a, c, g, or t
  misc_feature (1326322)..(1326421): n is a, c, g, or t
  misc_feature (1326487)..(1326487): n is a, c, g, or t
  misc_feature (1326497)..(1326497): n is a, c, g, or t
  misc_feature (1382022)..(1382122): n is a, c, g, or t
  misc_feature (1399022)..(1399022): n is a, c, g, or t
  misc_feature (1471213)..(1471312): n is a, c, g, or t
  misc_feature (1769206)..(1769305): n is a, c, g, or t
  misc_feature (1939758)..(1939758): n is a, c, g, or t
  misc_feature (2142833)..(2142932): n is a, c, g, or t
  misc_feature (2145333)..(2145432): n is a, c, g, or t
  misc_feature (2203432)..(2203531): n is a, c, g, or t
  misc_feature (2255880)..(2255979): n is a, c, g, or t
  misc_feature (2262936)..(2263035): n is a, c, g, or t
  misc_feature (2346003)..(2346102): n is a, c, g, or t
  misc_feature (2451830)..(2451929): n is a, c, g, or t
  misc_feature (2470453)..(2470552): n is a, c, g, or t
  misc_feature (2477531)..(2477630): n is a, c, g, or t
  misc_feature (2483600)..(2483600): n is a, c, g, or t
  misc_feature (2605454)..(2605454): n is a, c, g, or t
  misc_feature (2605456)..(2605458): n is a, c, g, or t
  misc_feature (2618748)..(2618748): n is a, c, g, or t
  misc_feature (2747253)..(2747352): n is a, c, g, or t
  misc_feature (2772340)..(2772340): n is a, c, g, or t
  misc_feature (2786947)..(2787046): n is a, c, g, or t
  misc_feature (3008140)..(3008239): n is a, c, g, or t
  misc_feature (3042933)..(3043032): n is a, c, g, or t
  misc_feature (3053688)..(3053787): n is a, c, g, or t
  misc_feature (3646324)..(3646423): n is a, c, g, or t
  misc_feature (3688494)..(3688593): n is a, c, g, or t
  misc_feature (4078647)..(4078647): n is a, c, g, or t
  misc_feature (4424652)..(4424751): n is a, c, g, or t
  misc_feature (5594475)..(5594476): n is a, c, g, or t
  misc_feature (5695259)..(5695358): n is a, c, g, or t
  misc_feature (5800528)..(5800528): n is a, c, g, or t
  misc_feature (5804161)..(5804260): n is a, c, g, or t
  misc_feature (5962328)..(5962427): n is a, c, g, or t
  misc_feature (6113477)..(6113576): n is a, c, g, or t
  misc_feature (6114175)..(6114175): n is a, c, g, or t
  misc_feature (6114285)..(6114285): n is a, c, g, or t
  misc_feature (6114299)..(6114299): n is a, c, g, or t
  misc_feature (6114988)..(6114988): n is a, c, g, or t
  misc_feature (6115074)..(6115074): n is a, c, g, or t
  misc_feature (6115439)..(6115439): n is a, c, g, or t
  misc_feature (6115658)..(6115658): n is a, c, g, or t
  misc_feature (6144932)..(6145031): n is a, c, g, or t
  misc_feature (6263926)..(6263926): n is a, c, g, or t
  misc_feature (6264199)..(6264199): n is a, c, g, or t
  misc_feature (6264346)..(6264346): n is a, c, g, or t
  misc_feature (6264768)..(6264768): n is a, c, g, or t
  misc_feature (6266765)..(6266765): n is a, c, g, or t
  misc_feature (6266905)..(6266905): n is a, c, g, or t
  misc_feature (6267135)..(6267135): n is a, c, g, or t
  misc_feature (6267179)..(6267179): n is a, c, g, or t
  misc_feature (6267283)..(6267283): n is a, c, g, or t
  misc_feature (6268806)..(6268905): n is a, c, g, or t
  misc_feature (6277981)..(6278080): n is a, c, g, or t
  misc_feature (6284799)..(6284799): n is a, c, g, or t
  misc_feature (6284818)..(6284818): n is a, c, g, or t
  misc_feature (6284841)..(6284841): n is a, c, g, or t
  misc_feature (6284861)..(6284861): n is a, c, g, or t
  misc_feature (6284916)..(6284916): n is a, c, g, or t
  misc_feature (6285286)..(6285286): n is a, c, g, or t
  misc_feature (6285538)..(6285538): n is a, c, g, or t
  misc_feature (6285540)..(6285540): n is a, c, g, or t
  misc_feature (6285546)..(6285547): n is a, c, g, or t
  misc_feature (6285585)..(6285585): n is a, c, g, or t
  misc_feature (6285663)..(6285663): n is a, c, g, or t
  misc_feature (6285677)..(6285677): n is a, c, g, or t
  misc_feature (6285692)..(6285692): n is a, c, g, or t
  misc_feature (6285700)..(6285700): n is a, c, g, or t
  misc_feature (6285718)..(6285718): n is a, c, g, or t
  misc_feature (6285743)..(6285743): n is a, c, g, or t
  misc_feature (6285781)..(6285781): n is a, c, g, or t
  misc_feature (6291855)..(6291855): n is a, c, g, or t
  misc_feature (6291881)..(6291881): n is a, c, g, or t
  misc_feature (6292296)..(6292297): n is a, c, g, or t
  misc_feature (6292602)..(6292602): n is a, c, g, or t
  misc_feature (6292668)..(6292668): n is a, c, g, or t
  misc_feature (6292802)..(6292802): n is a, c, g, or t
  misc_feature (6292831)..(6292831): n is a, c, g, or t
  misc_feature (6292883)..(6292883): n is a, c, g, or t
gatccttgtcatggcgggtgatcagccatgttggcgcacttgtggtcaccaggtgcattaatggagcagttaatgctaatttgaaaacgcatctacaagtacactgtgcatgtcaaattcattgagactttagcgttgttaggtgggactcagcattgtgtcggatgtctataacatacattgtgctcctgggcctctacctatatgcggattatgtagacttcgagtccaccttctgtccatgttcacttttcatattgaggcaatgctgtcctatatttgtacactaacttagacagaataccacaccttcccaattggagttatctgatcctactatgcctagtgcggtgtaatcccgataatcgggtgtatgcgcacaagccctatttcggatgccgaggtcacaccagtcgcgtgttaatatgacacaagtggagaaaagtagagatcccttccttttgttccgttcttccgtccccttttcaaatatctttttcattacaaagtatatcaaatattgtatgttgtacattggatatacaacataggagggaaaatgatatatccccaggtcaagtgaccggctccgtcattccggcaatgacatgatgtttccctaggtcagagttaattaacggggtctcaatgcatgttgctgccagatagtggagacgtttcgtatatattatgcagttatgaagttccctcgagaaaaaaagaagaaaaaagaaaaaagaaaaaagaccttcacaacaaataagacagtaacaaagaccaaaagggaaatcaaactttcatcttatctgatgaggtgaaccagggaaaaagtgacttggcagtaccagtgcagtaccacagcctcagcccatgccactaagtgaactgatgtattccgtgggtacccctccaattgtaacattcccgtgcccggaactccacctttttttaattttcctctttgacacatctttcccatacctttggggaataatactctgagaggcagctgggtatctcaacatcccagaatggtgactggactacgactgtgacctcgggacactgtttcttaaactgtcttggtgcagcatcctggaatgctagagatgagctgagatcagacctcagcctctcacctcgtctctctgccaccaccgaccccatcaacgtgcataagtgcgaccgacgatcgggcttggtgtcgttttgcccagcgaacccaagacttgcaagcctgaactcttcaagacctgtttccccttacatttgggcgtctcccctccgaagcacggcggatctacccatctgctaatctgccccatagctgcctactggatcctgcttcttacttaccatagcccttcatgggttgacccccgaggcaagcgcgcttccacaactttttacatatcgcgccccatatttattttcttcttttcctgtcctaatccggtctccgattcgctgttgacatctcgtgttgtcgtttctttttccctgtggatctgactggttcgggctactgggctgaagggcggaagtacttactcattattagagcaggggttcttttcctttttgtgtgatacacctgccgctacttcacttctgatgtcgcatgaactcttcttttttgatgatctgtttcccgcttaatcgccgcttttaaggtcgctgtcttctgtatatggtttcgaccaatcccggaccgaactcttttgccggttattcttatatggacgctttccgttagagaatacttctgttgaacgtatacgatcttgtggtaacggtgtgcatcggtcacgagatgccacttctcgatccacgctcagggccgtcctacggcactatcgaacacgaaaacgccagaatggaagatgaaagggaccaactgttgcaggatgactgcgaggtcgagggccagtctagtgggctgtccacaccggatgaaatacaggagggggtgcaaaagattgaggccatcaatttgacttggacaactaagtctttaatgatagcctacgtcaggttcgtgtggcttgcagtcccgtgcttttgctgaacccctgctgacttagcgtgaagtatattcctcatggcattctgcacgtcgctggaaggtcagactgtgatgtcgctgtctgcatatgcgacgagctcattcagtaaacattcattgatatcgaccgtcctcgttgtccaaaatgtggtcaatggtgcgtttactaccccgcaaaaatgagccgctgctaatcgttaatcgatctctagctgtcatcaaaccccctatggctaaaatcgccgacgtattcggtcgcttcgaggctttctgtttgagcatccttatttatgtcctgggatacatccaaatggctgcctctaccaacgtccagacctacgcttctgcccaaatcttctactccgccggctcgacgggcttgcagatcctccaacaagtctttatcgccgacagcagtgacttgctcaaccgtgccttcctcgccctcctgcccgaattcccattcttggttacggtctggctcgggccgaccattgcgggggcggtgctgcgcacttcctcatggcgatggggttacggaatgtgggctattatcttgcccgcatccttcctgccactcgccctcactctgctattcaatcaacggaaagcccagagattgaatttgatcaaaaagaggaccagaagacggacggacttggccagcatcatgcgtcggacctggtacgatctggacgtgggtggactggtccttttgtcggctgctgtcacattaattttggtgcccttgactctcgcggccaacgcaaagaacgggtggaagaatgccagtattctggtcatgatcgcacttggtgttgtttgcctgtgtctgctaccgctctgggagacttcgcggaaattggcacccaaacccctgctctctctccacctcctcaagcagaggactgctcttgcgggctgtgcattggcgttctggtatttcagtaagtcaaagtattctctcggcttttgagatgtccttgctaaccttacctagtggccttctacttttccgttcagccctatctgtattcctacctgcaggttgtacaagggtacgacgtcgccactgccgggcgcgtcacccagaccttttctttcacctcaaccattgctgcattcagcgtatcgctgcttatcaagtacactcggcgataccgcgtctacattaccatcggatgtgttgtgtacatgagcggcctagccctgatgctcttataccgaggcgaaggagcctcgcacttccaagtcctcggcacacaagtcatagtcggcatcggaggcggtctaattaacgtgcccgtccaactgggcgtccaagcctccgccagccaccaggaagtcgcagcagccactgcgatgttcctgacttcaatggagatgggtggtgcagtgggcgccgctgtctcaggagccgtttggtcctctgccatcccacacaaacttctccgttacctccccgaggaaagcaaaggccaagctgctgaaatctttggcaaactgaccactgctctgtcgtacccaatgggatctccaactcgcattgccatcaaccgtgcgtaccaagagaccatggacaggctgttgacgctggctgtcatcgccaccctccccctcattccgttaagtcttctcatggttaactacaaacttgacaaggtatgttgccaatcatatttttttgaggatctcctctaacttgattctagatgggctacggtagtcccgaacgccggggcgacccagccccagtcgaggcagaggcagagcccaactcggatgatggacactccaaacgaacctaaaccccagcattcctgtgtgcatttcaccgcacacgacgatcacgatcttacgaattgaacttttctgtgtggcttatttcacggcttaattttgcatctccatacaatccagcaagcggcgttttgagttgtctgaacaaggtgcaacacatcctcgatatattctgttcacccggacgatgagtcagtccatcacttgcattcggcgttgctgtttttatgtattcatgggtctaaaggtacatattgtatctatctccaagacggtaacagttcagtagacttggataggtgtcaatcccgaaaattgaatacccaaggggtagcgatagacttgccctactacactggactgccctgcactacatattgtagcattttgtatcgccggcaaagatacataagtccgtgtcgactgcgggccatagcccactacctggtcaagcacactcggtacactccaaagcgctcggcagtttcgatccacacgacagcagacgtccaagaccgacaccaagcgattattccgatccggccggcttgccgctctaagaccctcgagctgtaacatgtttttcgcatttcctgccgttacggcctgttttgtttctctggagccagaaatagggttaattcccctagcttcgcccactagacaaggtactttgcattggcttagaccaggatcgagtatcccggtctgattcagcccaaacttcacgcaacgcggccttatatccactgctatccgtcactgcaggaaggatttggatttgattttatttcaaatgtcggagactaaatagacctgtacatattgaattgactcttgtcttttctttttcctgtctccccccaacccatcccccaacccttactcagctcgtcgagcaggcctcataccacgtctctccacgtatattacccgtgcatgtacctgcatatatgcatgcatacataccagataccgcgacggaagggcttgaggacccatgagatatggatttgatcagcttggcacccctggcatgtgcatgtgcttactgtaaaggtatattgtacccgtggacggaggtgctccgtatggaggacgcatgctgcaatatacggatgtcatgtcagctgtcagccagcaatcattagctcctagacgacctagatgacctaggtaggtaagtagtaagtactcatccatgcgtatacctagttagtaatgtgagtcacccacctgggcaatgacctcagccaacgcagttgatgcgatagttggagagactggatctggatcgggctgccaagctgtgataggaatacgccacttacgggatgatggagtaagtaagaattagaatatgctggattgggattgagtgtatgaaactatgtatggattgtactttttggactatctggaatctctcataaaacggcgggtttgtgaaaaggggagatttggggccgatgggagacgggagaccgggaacccgtgaatggtgaaacggaattgaaattggggacttttttcattattagtaacttgcttttttttgcccttttcttttctttcgtgtcacgggaaaagggtgaaagaaaatgagttgactcgagaggaaaagggggggaaatactccgggtctccttttgttcgtgctttaagaccgggcttatcctataagacttagggtagtattggggttataggtatttactactatttagtacttggatggaattgggactgtaatgcaatttcgtagagatcttaattcgagtctacctaggtagaaaatagagaataaccacagtgcttagccgacagcggctggccgttgatatagaggagtcgaggggggaggagattgagactgataccgtttctcttggcagtaatgaatgacattaaaggaaatattcgaattttcatagatatgaattattacatataaattggatataaaaagtacatctaagaatataaaaaaaaaaaaaaagatcctaatatctgataaatacatagacagtcaagcgagaagaaaaaaaaaaaagctgtacggtgtatcgagaccaggtgtctagactccatactctgcgggttgccccattcaatccagaccacagcttcttcctccctttttgtctcccacacctcttcctctctaacactcttacatcaatacttcttcaaaatggtcgtcgctaccatcaagtacgctatcctatttccgcttcctcttcggcgaaaacctcccagatcttatggctaacaaccccagatgtgtcgtggtgggggacggtgcagtaggaaagacctgcctgctcatctcatacacaacgaacaagttcccttcggaatatgtccccactgtcttcgacaactacgccgtgaccgtgatgtaagtcatcatccgccatccccccctccccgagaaaaaaaaaaccattatacgtccaacctcaaaaggataacacttctaaccgatcgctctccaaattcaggatcggcgatgagccttacactcttggactgttcgataccgccggtcaagaggattacgaccgcctgcgcccgctctcttacccgcagactgacgtgttcttggtctgcttctccgtcacctcacctgcttcattcgagaacgtccgcgaaaagtggttcccggaagtccaccaccactgccccggtgttccctgcctgatcgtcggcacccagactgatttgcgcgatgacgccggtgtgcgggacaagctcgcccgccagaagatgtcccccatccgcaaggaagacggtgaccggatggctaaggaacttggcgctgttaaatatgtcgagtgttctgcgctgacacagtacaagctgaaggatgtctttgacgaggtacaccgaatcttccattttttcgctgcccgatatctccacaccgccactaacccagtttgtttctactttctaggctattgtcgcggcactcgagcccgcgcccaagaagaagtcaaggggctgccgcttgctgtgaactcactcttcacggacttatcgcaacaggttggtcccgagtgcggatatgttgcacttgggttgatgcctggttgacgcgcgcctcgaagcagctacgatggaatgaacctgtttatttctctttttctaactctttcaacgttctactgggcggcaaatatttctggctggactggttttctgggatatccaaattcggcgacaaaaaaaaaaagggggggaggagtggtcttgtattatggctagcgatgctatctgaagcgttccatatctacgttttccagttgaaaatggcttctgtgctttttcttgatccccttttctcttatttttttgtctctgttcacatatcctggtttgagatctagcctctctaatttgctgtgttttttttttttttttttttttttcctgctctctatctctgcttctcttcttcttgctgcgcctggctgcgtctatctgccgtcttcaacgacctggtttggagttaccctcctctattctcaccttcaccctcattcttctcctttacgaactacagcgacagcaattttgactttctcccatttttgtcgcgtcggctacacttccattctacatatcaccttctccgcacccggcgcttgcacctcttggatcgtctctctcggcgttggacgtcagggcgtcgtgttttggctggacggtttccgtcccgttgtcccatatccccatatcctcctgtccttttgctctttcacgtgctatttatgtacccccaactttgcgaccaccggactatgaacttgagcttgctgtacccttctcttgcagatccggcttcttctatgcgtcttttttgttgcccctgcggtctcgccgtttattccaatctgatctacaatcgcccattactcgtctgcacgtgatcttgatacaggcatcttcgttcatgctgctgcaatctcttgcagtctttcaagttatgtctcactgaagagcaacgttatttctgggtcttagaaagtcacagactccaattctagttctatgaagttatttggttgaagatatatacgtatattactcagtagtatggtattgtacttcccaagttgaggtccgagtctctgatatcataggctaaatgagctcctactgccatgacatcactccagtttacaattatcgtggattcaaaacattatatgtcatttattcttcaacttcattccacatacatctcgtagatcgtagatccgtccaaattcaaagctcatccttactctccatcttctccttcttctcctcctgctccatccacccataccacccaccaagctcctcgtcaacaccagacttaacaagactggtaataatctcaaaagcaacctgcgccgccgcaagagcagtagtctcccccttattgtcataagccggcgaaacctccacaatatccgccccaacaatattcaacttctccaacccacgcagaatccgaataaactcacgcgtagtccaaccaccaggctcaggcgttcccgtcccgggcgccgtagacggatccaaaacatcaatatcaacagaaagataaacaggctgctcaggatcaatcccggtgcgggcaataatcgtctcaacaacccccataggcccaagctcatcgatatcatccgcatgaacccgaataaatccctgctcaggcccaggattcgtataatcccccgcatcaacaccagtaagccgagtccgcagccccgcatgcgcagaagtagaattacaaatcaatccctcccgactcgccttgtggaagaacgacccgtggttaaactgcgtctgctcggactgccagtacgcgctgtatcgcacaggattccatgtgtcgagatgcgcatcgaagtgcacgactgttatcggcttctggtagatctggtgcagggcccgcagtgccggcagcgcaacgctgtggtctccgcccagcgttacgagcttggggtgtgtagcgccgatcccgttcgccttgggtgctttgttcacgatgctgcgcgaccctagctcaaggaatgcttcgtacatctgtcgctcggccagcccgttgtcgaacggtgtgatcgggatgtcgccgcagtcggtgatcttcgcccatgattggtatgggttcaggccggcgcgcgtgttgtagcttgttgcggccatttggcgggcgctggcggcgcggattgcgcgtggtccgaagcgggcgcctgggtttttggttaatttgagttctggggttgaattcatgctggatgtattgggaggggatttgctttcgtacctggtcggtagctgacggctgtgtcgaatggtgcgccaataatggcaatgtcgtagtgctcatcgggctcgattagacacttgactggcttcaggtgggcgaagctggcaatgccggagaaggaccactggatggttacatgttaggaatcgatcctcttttcttggatgctgtagtatcgtacctcctgatcccacttcttgagtaattccgcccgctcatgttcgggcactacctcgccgttatcgtggtgcgcgcaggaggccgcggagccggctaaagccagtgtaaggaaggtcttccaagcaggcatgactggagttattgggatgaagtaaaagtaaaattggaaatgacgatatttattgttctacatatctctgtctcgtcgagtttcctgaagcagcaggtgttgtaaagggaaagacgaacagatggggttgtcccgatcgtgcagaccttcccttcttggctttggcccgcttttcgtttctttcttttgacaactcctccgatagcttttatacagagctacgatgcaatgcgacgagttgttgtaaccggtcttggggcggtgacaccgctaggtgtaggtgagttgctttgtctttttagtttgtttttttgctggcattggtagccccaaggtcatccttggagctcatatggacatgttatcggggacagaatgcatgcgaacttgcaattacgcaataccgcaattccgtctgtcagcacaatctctgcgagcgcattccatccatcttcgcttatccgggagcccatgcatgatgtccgatatccccggactccgggctctcgagctccctctacgttccccacttcccactccggaaggggaaggttgtgacagccaatgacggagggcatgcagattagtgcgggacacttggagataagaggcagtacctgccgtatacatcctgggtttcattatacgtgattgatcgggctttgtgtttgcaatatctaaatgctactatgactaacaccttgcttggcttcagggattcggcgtacgtggaaacgtttgctagatggtcattgtggtgtggttaatgtgaaagatcgcgatacgcggtatgctgagcagccctgccaagttgctgctgttgttccacagggcagtcgcgagaacggggggtggactgcttccgaatggttgagtcgagttgtacgcttttccccctaactaccttcactttttttatctgtgttttattggcaatgctgatcttttgggcgcggataggaggagcggaagatggctcaatttgcgcagtatgccatggcggcgacagaagaggcgcttcaagatgcggactggaaacctgagccttttgagcagagggaggcgacagtatgtgtgggagcacgcgccacttcgacagctatgctaaccattttgatagggagtctgcctgggatcaggcattggaaactttgacgaaatctacaacacggttattgcctacgacaagggggtaagtctcttctatcgtacatgatctaaggaagcctacgactaacttcttgcacagggctacaagaaggtcaatccactgttcgtgccaaagctgctgattaaccttggcgctgggcatatttccatgaagtacgggttcatgggcccgagccattccgcaacgacggcttgcacgactggtgcccattccattggcgatgcagctcgcttcattgcctgtggtgatgccaatgtgatggtggccggtggcgccgagtcgtgtatccatcctttggccattggcggctttgcgcgcgcaagaagtctagcgacggaattcaacgacactccagagaaggcctcacggccattcgatgctgaccgtgcaggctttgtggttggcgaaggtgcagctgtgatggttcttgaggtttgtttcctgtctcgtatgcgaatactacaacctgatattgatgtctgagatataggaactagaacatgccctctcaagaggggcgcggatttacgcagaactcaaagggtacggctgctctagcgacgcacaccatatgacctcgcctaaggaaaatggcgaaggcgcgttcatggccatgaagaaggctcttaagcaggcccagttacgccctgccgcagttgactatgtcaatgcacacgcaacttcgaccattgtcggcgacgctgccgagaacgctgctatcaaggcacttctgcttggcgctgatggcaaagataaggctgctcatgtgaacgttagcagcacgaagggtgcccttggtcacctgcttggcggtgctggagctatagaagctttgatcagtgtacttgcaatccatgaggtgagctgcagtagtgcactggacgtactgtgctggaccttgcgctaacaggggacagaataccatgccacctactatcaacctagaccgcttggctgatgggtttaattgcaactatgcgccgaaagatccccagtcccgacagattgatgttgccttgacaaatagctttggctttggcggcacaaacagtagcctttgctttgcaaactattcatgattctttattgtacgatattttcgtttcaactacaactatgtggttcttttttagggccagaggcttggcaggtactgatgcctgggaggaatcgttgcctgattgatctgaccgaccaacaatgtattatgtgaagagattgttgaaagaaaattgataccctcactcattggccattttcaataataaaagaaagaaagaaaaaatgaaaatattacgatcaaagcacagtaggtgtctaaatgtctagttaactattcagtagatcaaagatcaatagatggcacgtgaccgatcctaatgcggagccccaggccgaccttgactccggagactgaactcattccttgataaccgcctcccacgccatttcaaaggctctctgagtgacaagaaatcgttctgtctctcggtaatctttcactttgcgctcaccatggcgaacaatggtgaccccggtcaaggtacgcaatacctggttcctgtcaaaggcgcaaaacgcctgagatactttgacatcaagctcggcgcatctagcgtttttaaatgatctaagctaattatgtgtttgttgacaggacggggaagtctggttgatgcgtccgggtacaccttcacggacaaggataccaaacccggcaagatcaaggtgaagaagacatccaaggcgtccaccaagaagaaggcagatggtaaagctccccggacatgtttctacaggcgtttatgatactaaaaaatccacatagatgccaaagatggccccatcgatacctctcctaccgcttcgcccctgcccgtcctcgacagcaaagtcgtcgccgtattcccgaccggcaagccgcgcgaagacgacctcctcgagactgtaatctgcaagcattgcaagcggcccactctcaagcaaaccgcagcggagcatgtccgcggctgtttgaaggccaagcaggagaaggcgcgcaagaagaaggaggcccgcgacgcggcaaatcgcctgaaggccggcgacgatagagacgatgacggccccgacaaggccgacggggacaatcccaacatgggccagaagagcgccaagaagagcgctacgaagggtaccgaggacggcaacaggaagggcaagaagcgcaaggccgatgaggacgacggcaaggagtcaaagaaaaagaagaagaaggatgagcctaagcaaaagacggccaagccgaagggccctgtcgatgtcgagaaacagtgtggtgttactcttcctaacggcgcgcagtgcgctcgttccttgacctgcaagagccattcaatgggtgccaagcgctcggttcctggccggacactgccgtatgatatgcttctccagcagtatcagaagaagaaccaggctcgccagcagagtaagtttactattatcttgtttatgctcactatagatcgcaaggtgactaacccgttcgaactacagaggctgctatcgatgccaacgctcctctgcaggaggatatcgagaacaccggtcctattgattcagatgaagaaagagatgccgtcatggctgccattgcccgttctgcgccccagcctcttattcgccaccccgtcatcaccaccaagtcgaagtacagatatgtccgcatcaaggagcagatgtcgcatgctatgggagtccggaacggcggtggacttttctccaacggcgatagccagccccttttcggcggaatacttttctcgactgtcgcagacgatttggaatcgtctgttgaagatgccaatggggagcctgatgtctccgctggtggaatcgatgtaggcaannnnnnnnnnnnnnnnnnnnnnnnnnnnnnnnnnnnnnnnnnnnnnnnnnnnnnnnnnnnnnnnnnnnnnnnnnnnnnnnnnnnnnnnnnnnnnnnnnnnatgggtacaggctggttctgtctgctttgaaaggtgacgatatgataccccggctggcgtgatgtgtacatttgacgaaagtagttgcaattgaatactttccaccttcctgagttctgactgatatatatgtaaacatacatactatacgtacggagtagtcatgtaggaaattacggcgaatgcaccatgcaggatcactagccctgtagcctgggcagccctaccaagtgaagctattcagagatattcagcttacgttatacatgcctgaggcatcagggcatctcccagctcgttctgttcgccgatcatccattgtctttggaacctgacagcatgagcaaagcgagccttactctgacctttgagtgatcttcttcattcatttgcttcaaagccacctgcagtcgaaaaacatctggtttatattgtggcgattgcgggcgcgcgcccttcgcatttgctatcactccaccaagctttccgagtcttattgatcgcagcttgacccccctctcgacttttgagggaaccccgagccttccagacccattcttgggcttctcgtgccataacacccacctctgttgaccttcgatccttcacaatgggccacgctgtccccgatctagacgcgataggcatcaaagccgaccatgacctagctgatcaatttcgccgcgaagtcgcccaactcctcgggcgcagtaacctcaactttcctggagcacaaccggtcagcttctcgtcaaagcacctcaatgagctgcaacgggaggactactttgtctgcgaaaagaccgacggcatccgctgcctgatgtactttgcgcgcggagatcccgactctgacatgccggaaattcactacctcatcgatcgcaagaacgactaccgctacgtaccgggcctacacttccccctgccgaacgacgaaagttaccagggataccacgtcgacaccctggtggacggcgagcttgtcaatgacacctacgaggatggcaccacccagctgaaatatctggtcttcgactgtctggttctggacggacaaagcttgatgcaccgtactctggacaagcggttggcgtacttcaaggaaaaggtgctcaggccatacaatgccatgtatcgcaaattcccggaggagaaagcccaccgccccttcgcagtcgaggacaaatccacacaattcagttacggtattgagatgatgttccgcgaaatcattcccaaggtcaagcgcatccacggtaacgacggtctcatctttacttgccgcagtactccgtaccgcatcggcaccgacgaacacatcctaaagtggaagccaccccaagagaacaccattgatttccgtatgcgtcttgagtttccgacgctagagccggataccgaagatgaggctgagggtattacccagccctacttggactacgacgctattccgatatgccacctgtttgtcatgctcaatgctggcgagtaccgtcattttggggagatgttcgttgagccgaaggaatgggaagatctcaaagccctgcgtgttccacttgatgacactatcgttgagtgtgccaaagatgcggaaggacgctggcgcttctatcgtattcgtgatgacaagaacgatgcaaaccacatctccactgttgaaaaggttcttgaaagtatcgaggaccgcgtcaccgaagatgatctcattcgcctcgctcccgtcatcaaaacagcttggaagcagcgccagcacaacatggctgccggggacgaggagaaaaagcggagagctcaggctatgccaccatccgcgaatgcgaatggtgtcaagcggaaatatgaagggtgattagagagacttatatagccttttggctgggatatatgattccttctcgtctattcctcgtctctgattcattgcaaggcgcttggcgttggtttggactctgtattttatctacaagatcgtggcatggcaacatgggaaggggatgcgaattccgagaacggggacggtgtttacggcattatcatttggattggttcaagcaatgaagaaattcaccttgcctcttgtaatgtactctttttaatcacgaaaatgtaactatatcaagttctgtatagactcgcccgatgcggaatagcttacataacaacctcccagtttgctccctttcccgccaccatttccccatcaccaaatgaccacagtatctgctcgattccatcattctcatctctgatattgcttcagtccctactgccagtccaagaagatgggcgtccgagattcccatggggaggcgacggggacgcccgaccccgttgacaaagggttcgccacgctcaacaccatcaggtatgtcgctttttatatctgggataatannnnnnnnnnnnnnnnnnnnnnnnnnnnnnnnnnnnnnnnnnnnnnnnnnnnnnnnnnnnnnnnnnnnnnnnnnnnnnnnnnnnnnnnnnnnnnnnnnnngccttggggtttttgtgtctacttttaccggtcgcagatactaactggcctcatagaatcggtgtgaaggccatggtgcagaaggtccgttttggccctgtggtcgcaaattttggtgatcatgtcacgtgattatcaatcggcatggtcaacccccagtctgggctttgatactgactattctgtgtaggatggagaattgcgaaaagctgagattctgtctattagacagcggaaggatggtccttccttttagtatgtttacctttgcacttatcatgtccctgcttttgaattggtgctgatatagatcccagcgtacactatgttgatttcaacaagcgtctcgatggtaagttcctactgcagtaagtgcattggctcactttggacttttcctaacttatattccagaatgggttgcgtcttctcgcatcgatctctcccaggaagtcgaatggccccagccagacaaggctgacaagaaaaagaccgccgccgccagcaaagcggctcccagcaagaatgtgggtgcgaataagcgtgcccgggctgacagccgtgatacgtcacaaacacctgatatcctgggcggcaagaacgtgaacgtcggcaaattggcacggccctcgaaagctggagggaaagagaaccttggtgtcgagacacctggaggagacacctcgctgttcccgtctgaggctgcatcaacagtggccacgccgaagcccaccgagtcagaagacttcgagatggcagatgctccagcggaaagcaaatcggtaaaagaagaccatgtccaaatggcaaccggtgaggtgatcactcgcggggaggaaatcgagcgactccgcacaggtggtagtatgacacagaacccgacagagatccatcgtgtacgaaacttgacccgcctccagatgggcaagtacgacgtcgagccgtggtacttctccccgtacccggattccttctcggacgtcgacttagtctacatcgacgagttctgcctcagctacttcgacaacaagcgtgcgttcgagcgtcatcgcgcaaaatgcaccttgacccacccacctggtaatgagatctaccgtgacgactacatctccttctttgaagtcgacggccgtcgccagcgtacctggtgccggaatctgtgtctcctgagtaagctcttcctcgatcacaagacgctttactacgacgtcgacccgttcttgttctactgcatgaccacacgcgacgagaccggctgccatttcgttggctacttctccaaggagaaggactctgctgaagggtacaacctggcgtgtattatgactttaccgcaataccagcgccgcggtttcggccgtctgctcatctcgttcagctacgagctcagcaagcgcgaaggcaagctcggctctcctgagaagccactcagtgatctcggtctacttggttatcgacagtactggcgcgagacactagtggagttactgattgagccaaatcgagaagctataagcgagaacgagctcgcggtgctcacctccatgactgagaaggatgttcacgagactcttgttgtattcaacatgctccgataccacgtaagtctgattctctacgtgtgcactcactgcagcacatacaataccgtgtggttttactaactctccttgcagaagggtaactgggtcattgtactcacggaccaagtcgtggaagaacacgaaaagcgtctcaagaaggaggagatcaaaggcgcgcgcaaaatcgatcctgcccgtcttcagtggaagcctcctgtctttgctgcttccagccggacctggaactggtgagcggagggcttttctgcttacttttcttttgttgaatttcatgcgaactgtttttaatatgcgtggttaactaatggatgctcggggttggtctgggggcgttatggacgtcgacactgtggccgtcttcggacttgtggtatcagtgatgccactatatctacgttgatacagttgctctgacattatggttgatctgggcgtattcgagggacaaggcgtttgtttatcttcagccttataagggctttcctcggttgatacctatcatatgtgtaaattattttggctattttctgctcatgcttctgcttctgagcctgtttctaattaaaagcctttcatcactcagaataccaaatggtcatagacagggacttttctgtcccttctatcaatgtgacaatgtaatcaagtaaagctatcctggtataaaactgaaaatatatgcagattatctattcatattctcattaaatagaaagagcttgcaggtctccatattcattccaacagcacgccgagtatacgatccaagtcatataaaacagcccaataagacgccgaacactggcgaccaaccccctgcaaggaatcccgtaagttctcacttaaactcgggcataaagcatgcgacacccatatcaccagcgaaaattccccgcggtagtccaagagcaaggccgagtgtcccatcataatagcatacatttcctcctccaacccacagccgcggccattgcctgccgcccaacaggcgactttggatgtggcggtgccgtcccatagatatgcccatagccagcaatacttgacagagagtataaggatcccctgctattgattgtagccgagctacaggctcgctccaaagggggcgacccccggtctttggtgtttggggtatgtatatgtaggaatcggcgcaagagcatggtctaggccacgagtccggtaacttcatgggcatggtagttcagtgttatggatcggagggtcccgaatggatagatcagccggaatgcacatgtgcaggctctggggcggtttcggattatgctctcgttggggtctcggatgcgtgcttcgtcttcgcacttcgtcatctgtcacctgtaacatacagttagctcatggcctaaaataagggatttgttgagctcttgatctgacccatcaccctcgtctcactggaatagatcctagtgctcaactcacaacacccagagagcggggtggttggagtttgaccgggggagtttgacggggggcgttgacgggtgaaagtgaggtatggacaacgctgtcgcttctgagatggatctgcttgagattgggcactcactcattctggagaagtaatggacggagaatacatgtttgggagatggagatacacagcaagccaaacccttcttttacctatcttgagagttggaggttacgtttacactctacaaagaacgtggaattgtgtaacaatggaattctcttaaaagtatcggtgcggatttcgctgaatactcgacaacactgggcaacgtgatactgcttggtcggaacaagcacgcaccacccgggcaatgaccgcacaagcaggacgctggataggacaacgatggtcctcacatgaaaagccaaagggctgcagtcctgggtcggtcgggcgagggaacacaataggcgagaaattgaaagtcacaagtacatgagaaacgcgaatgcgtgaaggggatagaggaaggatccgaatcgtggcccaactccagaagtaatgaagtgggcaatggcaacaaggatctgaaacaaatgtcgattaggaattggcaaggatgaacccaagtcctcgcctcccaagatgaaccagcaaaaagatgtgaaagcgctttcagataaccatatgtttggagagccgaaacctcttaacgaggagtgggcggtggagtccagcccgtgtgctgacggggtggctgtcgtgggacggggttggaggcagacttcttgttggcaccggaaccttcgttcggcttgttgttgatacccttgcggggtctcgaattggtattagcattgcggcctcgaggcgggccagcctttccttggatgatgacagtctttgcctcagagccaccgggaaggagaattctagcgcgaatattaccctggccatcccgatcatcctggccaaccaggaatggctgaatgctctgcgattgcacctgtttgagatttcttccacgggggcgttctgatggacgagttgcgctccaagaattctggggagccatattcggcacgcgaacagcaggcagagatccgggttcccggtcttcaaacatctcatcttgctcatcgacttgtcggacggcgaaatcgccattgccagcctgtgatccagccttcgtctgcggaatagagacagatacagcgctagtttggacgggaaggggctccttagtagctgatgtcacagctaggacactcttcttctgggtaggagttgtcttcccaaggagaccgttaatcttatcctgccacgacatcgcggtggaggaagcaggcaccgtgttacgcggtggcgcagctgccatggaagcaaaagtcggagggggcgccggggcactcacggcctttggaggcagcttgacaacgggcttgggaggcttaggggcgggaaggttcacattcgggtgcttcacgtctccatgatgggcagggtggctgatttcctcaggaggaggaggcgaaggactgctgcgctccttctcggtgacctggcgtttcgactgctcagacgccgaggggaagaagcgagagctccgagtagaaacgttgctggccggacgaacaccaatatcggacatgttgagaccatccataggagtatcaatagtcgtgagagggttggcgtgctgcttcgcagccgccttggccctggcgatggcttcatcgttgttgacgactgattcggtgacttgagtgacgacccgtctaccgtcttcagtgcaacggattttcttaaaagtctcatggaaaaccataggcgggggaggcggggctggggctcctcccttgcgtcgctcctcaagtcgcttcaggaattccttggcttcctgtttctctttctcgaagatgttttcggcgcgtttattccactccttaatgcgagcctcccgtgtgctgctgggcggtccgattgggctggggcgtccaatggggttaagggatgagggatgacgtgtctcgggtgacggcaaagattcggtgggctcattaggagcagagaagttgggaggggtagacatatttggtgaatccaagccgagttggcctagagggttttcacgtgatgcaaaagtcccaagaggttggtcaaagatgccgttcccaagagttggagtgcggtcactgccaaacggtttccacaaatttttggcagatgtggatggtccagcaatgttaggatgagaccagggtgaagtagtagtcaaatttccttgccactgagtaccttgctcctcgagctttgaatcagatgtcttgctctggacaggtgaatgaggttcagttttgaagtgagaggaagatagaggtgcaggatctcgatggggttcttggtggggtgatgagacacgtcggttgagatgtttgctctcagatgtccgctcatgcgcaccaacgagtttcttgacagagtcgggatgatgcactttcatcaaaccatactgttttggttcacgatcgggctctggcacaggaggttttggaggtgaagaaatagagtgaatgggttgagaaggaagttgggaaggggtttggggaggatgaagagagtgagggtgaggatgaggttgaggttgaagagagggggggttgcgtgtctcgggggcctttttctctggcgcaggacccatagccgcgagacgttgcctaatcctctcctttttagctgcttcctctttctcttcctgctcaatccttcgttgcctggcctctaggcgtttctccttcataatacgctcttgcagagcaacagggtcctcctgaggttcttgctgaacttgaggaaccgctgcatgtgcttccacaggagatatacctacatcaacagccggacgtgctgtaccatttggaccagacggagcaatttggtctttgccttgatgctgctcgtgacccactatcgctgaatcacccagaccattcacttgagaacctctgcgagcatcattgtatctcggaggagcatcgaatcggccaactgacatcctacggccaaaccctccgcttcctccgctcacgttcgacgatgtgcgacgacgaccccaacccatgccatcctgatgactagacctgtgcgtctggaatgcagcagatggctctgcgggtccacttggatggtcgtttggtctctgcaaaactgcaggagcacgcgagtgttggtcatgacgccaagatcctctcctggtttcacccaccggctcgtactgggaagatcgaggattgaaaagctgcggcaaatctgactgatctttccacgcacggttgaaatcatccgctgcaatctccttgggcggcattgccattggggcatgatggccgtcgtctctctgggggtatctcgcggtcatgcgctgttggtaaggctgaaccgggacattgactggagacactctatcaacaggaggcagagcggcccagggagacttggatggcggtgctgggctggtggagctagatggaactttgtcatttgtgccgttagaggaagcgctcgcagttcttgcttgccgttcagcattagctccaactttgagtaccataccacgggaccccatagatgcagctggcttcggcgcagtcttgacaggctccttcggaacgcttggctccacaggcggtgactccttggtctcccgatgaccgggagccggagggggttcagtgtgaggttgagtgagattgaccttcgttccatctgtccactcgatcgtctcaggggcccaatcatcttcatcgtcatcaatatccgcccattttgcttcggagctaacagccccatcttcttggatacgagaagtcatatggattccgtattgttgcttcaattcttcatccgtcaagtgtttcggaggggcgggcgcaacagctacacggatatcattgtcagtctaagcaattctgttgcatcgcatgagaaatacatacgccggttcttattccacacttgattcggatctggccctgatccaccaggcttgcctccgcctgctccagccttcgaaaacgaatcacgcgagccctgtgtagacttcgcaaccaagcgcggccgggagcttggctgtggggtaccgagtggtgttgtagacgttggcgctgaacaagttagtgcccattatgagagatgcgtggcaaagaacatacctttctcaggcgccttggatggtgttggggcccccggaaccttgttcaccgagaacttgggaaatgaaactggcttgaaccctgatggctttttgagtgagccactgtgagtctgattcctgctatctggccggctcgcatctgattccgaaccaccttgtgatgctgtatcctctccaccatccgatgccgaggccagtccattaagttccagaactcgcgtcgcaacaactccggcgccttgcttagaaatatcctgcgcccatgttagcaagtgcttcagagcgtatccagaagcaatgctcaccgtcgtcgagcctccagcgtccttgtcgccggcagctttttctccccgcgaatcaggagtgttcgttttctcatggttttgctgatcatttgaattgttcgatgtagtggtagccattgcgatatgctcggtcttccctgcgtcccctccagcagatggattgtcgttggtgctcgcaggaacgtcggaaggcgaaggctcgccgcccgacagggtctgatctaccacatcgcggtttttctgctctgccataacaatactcgattctgttccgtacaataattgcgaccatgtaagccaagtgccctgacagtggggagatagatccggggatgcaataggcagctgcagatcaaacatgccagactcccaagacatacctatcgtcagataccaaggatcgccacagttgcactggttccttgactggttgcaccctgaatatatgggttatcacaaccagggatggtatcggccaactctctcggatgttgatgagaaagcccgcgtcgggttgggctcgatgtggagagtacgatcgcggaatcgataggcgcgtggcttggggatatccgcagcccaggaggtcccagaagggattagggcaaagaaggagggagtatgcgtaaggacggttgatgacacaaagatagtgaggatgatacgaggttcaagagtcaactcgggttgaagctgagggtcgctgttttcggtttagcgtggcccgtacgaaagttgatgtctgcccacacaccttcacgttggattcttttcaaaagccctaattttgtgacgttctggtcagtttagaatgtcgttttgttggatgctgtcgttgtttgcaaatgctaaacttccaagcatttattgatatttgatatctgacgtgaagttgatatgtgacgaggaagtcactaaaacttctacgtaatatgtatactccggggctaaatctaccgcaactacgagagaacgacaaagggtagtagatctgaatattgaaacacagtgagattctagaattctcgctaaagccacagttctcccttggactaggacagaggatccagtatatacatcaatcctccacctatctgatggaaagggaaagcttagtgggggtggttcttgtggtgacctggtcaaagaacatcaagttagtgatgtcccgactataaagagggtatataagcagtgtaatagccgtgaaatacatacgcaggtggaagtagtattccatgctgtaacccaggatcaggataccgccaatagcgtggacaagggctgcgtcgaaatcagtactcatatcaatacaagggaataattggcaaatacgtacgaacaccggaggcgttcttgccactgaagtagcgggcctggtagcgaccgatgagaccggtaggcttgacaggagcagcggggccacggggaagaccagcgtagaaggtcacaacacgctccatgcgggcggcatcctgggcggcaccaatggccttgattgagaatatgtcagttatgttggcgaaagagagacggcattttaatcaaatcgcgggctgcacgaaaaacggcttcggggcggaacgggtgtggaagggatgcaggaagtcgaagatggcagcgcgtgggtaactcacgttaggggaggcgacctacagagacagttagtatcatatgaggagtcgggtgactgcgaatagtcatgaatgggggtgctcttgccttgggggggatcaaggtcgagagacctcggcgggcaatgtagctcatcttgtctaggctgaagggggtcagaaattggtcgcactgaatagagcggctctcaatgagctttcgcaaggtggtagatacgtggacttacgttgattcgcggcgcaagtgaaccaaagaaagctgatggaggaggaaggaggaacaaaccgagccctgcgggtgttcggcttgccaagcccggctaaacccgattcggtggtgtcgtgacctgcctgtaattcgcaaccaaaccacacatgaagggagtcctcactggcaacgaccattccccgcatccaaaaagatacaatgtcactgttcagaattgggggtgctgctagccttcgggccgcccggattgctgtgcctgtcaatgcccgtttcgtctccagcaatgccctcaagggcgatccttccgtgaagaccagcacttcggatgctcccaccacgcctcccaaggacagctccttgctcaccaaggagaccccctccgaggccatggcccgtcaccagccggattatgaggccaccattgaccacggcacctcgtacgacattcccctttggctccgtcgcagatcctttcgctaactcttcgacttcaattaaggcaattttcccctgtgcccaagcgcgtcatggatggcagcgagcccggcgccactctccccgcggcagttctctctggagcccctaccgatctccaggcccgcaatgtccggtacgttacacaaaagtcgagccgtgtcgcctagctcccacactaacccgtggctcttacagtatctaccggcctaccaagcccgcaacacagtccggtacctaccaccagcaccactggcgcatggattgggatgtcttgcagcggggtcaccgttgggagaacccccttatgggctggcagtcgtctgccgatggaatgcagggcacccacctgaagttcaagtcgaaggaagacgccattgcttttgcccagaagcagggctatgaatactttgtccaggaaccgaacgagcgccgtttcgtgcccaagtcctacgccaacaacttcgttcacgagccgaagaagctcagacatatcaagaccaaatgatttgacttcgctgtatcatgtacatatttgccagtttaccactcgaactcaattccaagcacttcaatataccgcgttctaatatagttcatttttgcatgtcatgagttagggctaacgactggtagctcccattcaattaccaggagcaaaaggaacggaaaggacgtcaacactgttatttctttggaacaatgacacatgtatatccctcatgtgccttgggtgaaatctcatgttcaaatcaatgtgttggtctttgatatgactgaccggcatcacgacccttccaactttgtcaacttagtgtgctcatcataccaaatcatacagcatctggctagagcatatcaaacttgatttaataccaacatcccaagtccataaaggtataaaactggaatggggtctctcgatggtacaatatagggctttcagtcaatgtatctattcccactcggcagcattgtactgtgacatgagcgcagatgagcgagtgtctacctcactggctcaattttatttaatgttctgacattggaaaaggttgccaagaaagcctgtccgtcaaccaatgcttgtagctccaactgtccggtatttctcaaaatagctgtgctcggatcctgacgtgcttcctacggtatcacctgtatagtcactgaggccattgcatgagcatagggaatacgagcaaaactacctagagcctgcaaagtatgggctagctttagtcctaaagtgcttcgagctgatccattcaagtttctattattccagtagtaactgtatgtttatgacctctaaatgtctcgcgatagcaaatgtgagaatcttattcgattattcggtcaattattgtttcaaagatcaaaggtctcactcgaacgtacttatggaagccttggaagtctttatagcaagtaaaaaaagaattactacggagttatatattttaagatcagcgctcccatctacaagtagccacattcgtcaagtcttcacatacactaatacgtaattaacagatccaagggcatctacataggtagttaatttaattcataattacagactagggccttggcttacaccggaagcattcaagacttaaacgtacgagcaaaaagcccattgcaaaggctgaatgggccccgccaccccccactctaaaaattgataagatcaaaaagattaaccaactttttcttttctacttttatactctctgactaaaccactcaaaatggcctccgaaacagataataccgttcctactctccgtaaggttcttacctccgaatctgagccgcttgctcgccgcttccgcgctcttttctcccttaagcacctggcctgcctacaacctcccacagaccagaccctccccgccatcgaagcgatcgccgcaggtttcgcatccccttcggctctgctcaagcatgagcttgcctactgcctcggtcaaacaaagaacttcgaatctgtcgcatacctgcagcatgtggtgaaagataccgaagaggatgcgatgtgtcgccatgaggctgccgaggcgctgggcgctctcggatacgcggatagcttggacgtcctcaagagatttagggatgatacaaaggaattggatatcattagggaaacttgcgacattgctgtcgaccggatcctgtgggagaactcagaagagcgcaaggccgagaaattgaagcctaggtacgatctgcgcgggagattatatacccagaaatgctgacattgagatatttgatttacagtgatttcacctctatcgaccctgctccccccatgcccatagaggccagcgccgaaccctgcatccccgagctggaaaagacactgcttgacaccaagctccctctgttccaaagataccgtgcgatgttcggtctgcgcgaccttgcctcgcccccagatcttcccacagcagtcgacgccgtcaatgcgctggctaagggcctcaaggacccctctgctctcttccgccatgaagttgccttcgtcttcggacaactctgccaccctgcctcaatccctagtctcacagcctcgctgagtgacctgtctgaagtaggaatggtgcgacacgaagcggcggaagcccttggcagcctgggcgaggaagagggtgtggaggagaccttgaagaaattcttgaatgaccccgatcaggtggtcagggacagtgtcattgttgctctcgacatggcagaatttgagaaaaatggcgaaattcaatatgcgctgatcccggatagcgctgcacccattgctgcatgatggatatcctgcgaaaaaagaaacttgtctcgtgacggtcgtgattttaatactcttgtcccgctagttatacagcctttctccaaaaatagacctttccccacatcttttgtacaatccgtgtctgcaagattaattgttcgaggtttccctgtcgaaataatcagtatttcttggacatgtatagatgtatgctttcgaaacgggtgggcatacttgaatccgcagacacatctgtagaacacagtacttccttcatcggcactgcgcagttgcaccgtagtgtagaacatctgcttcctcccacactcgctacatgtacgatcgatgatagcctcagtcttccggtcctctgctgacagggtctggactgctgatcgtttggctctcagtgatgaggggaacgaggagggcttggactcagacacggttgtttgggggattgtatctgtaaatagaagttagcaatgaactgtctagcagcagtggaagaaccagaaggattttatccacccacctttattccgagtgccgcagacatcacagtgcagaatcgcatccgcattgccggtagattctcgaaggagattaccacaatctgtgcagaaaatcaaggaaccaatggcagacatattgatgaccgtaaaattgaccttgcgatctgaaatctgcagaagatcaagggtgcaagtaaaacaaatcgggccttatgcagcgaataatctatgcaactttttttttgacgcacgagcctccacataggcggtcacaggcggcagtagaggtgccgtcacccatacggaattcatgaacgcatttgattgtagctcagctcattttctttcagattctggcttttttccttttttaaattacataaatgatctagagatatcataaggcgcttgccttctttgccatgtctctaccaggagcatgtcaactttgtgactcgcgcctacttcttttgacttaaccgcgaccatggatcagaatggacgaccggccgtccaggtggtcatcaacggccatgatcagatgccatatggctccaatatgcagtttcggaatcaaaggccgctatctgtggatgaagcactgcagtactcatccatgtccagcgcgcctgtctttggtctcggttcgtttattgtctttcatcttcagttctgctcaatttactaacagtttgtatgtgcagactgtatcctacgccccgatgttggtcgaccttcgaataccacttctataaaccatgtcctccaagaaggccgcaaaacactgggtgaacttgacatggaaatgcaatctggacgagatgagtctggtcgtttagagacgtctcgggaatatattcaacagttgctggatggtgaccagctgacagaattgtaagggaactggaagttcttgaagcgcagtcaactaatttggttttatagcaaattcaagtttcctcaagttcctacgcgaagtcaacaattgcgcccaaacgatcctgatggtgctacttccggtcacaatagccttggctccttcgcacggttgatgctgagctctacggacatcgcattcagatgtaagccctaagatgccattgacggttgtatatagttaattgactgaccggccgcagatcccgaagcaccgtcaaagacaaaacccgaaaataaagacatcacgccgaagacggctgcttcgttgaatcagcgcgcatacgttgcgaacaagtcgaacccggcatctttcccggcctcttttgagcagaatcgtcctcctacatcgagccaactctccgtcgttattcctaccaaaccagtaccccagcacagcgatcacgcgaatgcgaagaagctccaattgaaagcccatgaccaagacgccatggcggcggtgcgactcaaggaccaaaaagaggaagcagatgcagccttgcaaaagcttcaagatcttcttcacgaggtttttgaagcagaagatcaaatagaacccgatacttcgactcccccaacctctgacacgccaaaccccattttcgtgaacccaacatctttagaggtgcatgggttgatactatcgtctgatgcccacacccgcctccagaaagcccttcggaaagttgcagggtttgaccgactccaggacataccgtctgactatctcaaccgcattcaaaagctgtgtgaaaagccaatcattgctgctcaaacccctgacatagggttaggcgattcattcagtgaacttgagtcccaggaatggctgggtaagaccgaggatgtgttgaacgcactatttgcaatcggaacgctgctgcagacgatgtctgggcgtcagaccgagcgagatctttgcccagaagatctcattgaggccattcccgccgttctcaatcaagtatttgaccattgcattattcccgcagtggaatcgcgcccaggtggcagagatggccagcatttccacttcttctccgcccaaaaacggatcattggcgctcttgttcaccagagcaagaaagtcctcactctttttgcagacttcttatcacgcattgatgtctccgaggggacgatcacggctgcggaattcttcgctgcgaagctaatatttgtggaaaatgcgcacaatgacaaagactctgctctgggatatcagaagtacgagcctgcgagacgtggtgcgatggatgtgcttgcaaaggtgttttccaaataccccgagcagcgtccgttcatcctggatgagattctggtctcattggagaaacttcccaccacacgtcagaatgcccggcagttcaaagttgcggatggaaaaaacatccaattactcaccgcactagtcttgcagcttgtccagacaactgcattagagacaccttcgcgaccaaagagcgaacgtcgaatcaaagcacaagctgatgacgatgacgacgagcttatggacgatggcgaagaccatgccaacggtgagtctgatgatgatgagtccgacgaatcgctggaacgcctagcgaacaagtccaaccgactctacgacaatgccatgcgctccgcacaatacattgtgaacttcatcgtccagcgtgctatgaactcgacgaagactggtgaccagccataccggaatattctggaccttttcactcaggatctgatcaatgtactgggctcggccgattggccggctgcagaactgcttctccggatcttggccttgcgcatgattcaaatcaccgaccaagataaaagcgcggcgactgcgaagagcatggcacttgagctacttggctggatgggttctgctatctcagatctgatagcaaccgctcagcacatgctcccggctctggaagattcagacagtgaattgactgattatctcaaacaacaatttgaggagttttcttctggtgcactgcatcaccaagacctcatcactccaacgggtccgtataggattgcgctcgagcaccttttgcaagacaagaattccgacaattggcaactgaccagcgcgcgggggtactacttggctcaatgggccaaaacagcctgcgccctatactataactccgagaatcaggaagaaattgcacacgacgaggtgactgatggcttggttactcttttaacaagatccttctcagacccacgctggttggagacccataaagaattcgacaaagttccaaacgtgcatggaaaattcgcttatatcctcacggtcttgaattccaactttggcaaagcattcgacaccattctcaaggttcttttggcctctttccttggtgactcggccaaggttcgcagccgcagtttgaaaagtgtcatctacatgcttgagaaagaccccaaccttcttgacagagacccttcagttttgcgcgtaatacaccggtgcacgacagatgcctcacccatggttcgtgattctgcattacagttgatcggacaatgcattggtttgaagcctaagctcgaagaagaagggtgccgaagcattttggcatgtgcagctgatcaaacagctggtgtccggaaacgctgcattgggcttttgaaggaactttaccacaaaacgtctcggaaggaattgaagctggccattctcgacagtttcctccaacgtacaggcgaccttgaggagagcgtggcatctttggctcgtcaaacctttgaggaaatatggctcgttccattccacgaatccattgattcctcgtctgaagggccaaaactgaaaatagcactcggagagcaggtcggcctcatcattggcctgacggagcgcagtgaaactgccctggagtctcttagcgtctgcctgaaaggggtcctgtcggacaagtccaagtccgcggcattgaacttcaaagtttgcaaggcgatggtttctaccatgtttcagagactggtggaggattcagatggatccagcaaggaattccagcaagctctgttacagaccatcactgtctttgccaagtcgaatgcgaagctgtttaccccggatcagctggaggcccttcatccttacattggacatctttctaccgcagatgatctcttcatatttcgatcggttgtggttatctatcgctgcgtcttgccatttttatcatcgtcccataatacccttctgaaagaagtgcagaatgaccttttcaagagcgttgccaagctcgcccgcgcggagttgaacgaagtcatggcttgtttgtggaccattaacagtgttctgcaaaatacgaacagactggtgaagttgacagtttcagtactgaaaccattgcaacaatataagagtgttgatctctcctcgactacacacgctgcaatcctggcccgtgccaagagttatattcgcatcgcgggttgtgttggacggcattgcgatcttgagaagtatgcgtctcatttcaagagtgaattccccacctgggccggtggctcagttgcgggcctgatgattgactccattattcccttcactgcatcaaattcaccctttgagctgagggtcatggctctcgaaagcttgggatccatatgccagtcttggcctggtcaattcggcagagaacgcacacggcagaccttcgctcaggctttcaaggaagatgcgccaagcctacaaaacatcgttctccgatcatttgcagacttctttgccatccatgaaggcaagtccgagaaggccgtcatgccaactgcagaagccgctgcccaggaagacaacaccaggctgggtggttctttaaaagctagcgacaacgatggagctgctgctttgatcgcccaacacttcctctcaaacatgcttcaggtggcacagtcgcgccaggatacttattcactgactgccattgaacttattgcgagtatcaataggcagggattagtacacccaaaggaatgtgcgggtgttctcgtctctctggagacttctacagtccctgcaattgcgaagatcgctttcgacacgcacaaaatgctccaccaacaatacgagtccatgtttgagcgagaatacatgcgcgctgtgcaggaggccttctattatcagcgtgatattgttggcgactccaatggcgctaatgctcggccttacgtctcgaagctcgcaccgttgtttgagattgtcaaaatcagcaacagtcggtaccagaaaaagttcctcgcgaatatttgctccaagatcaacttcgaaccgaagaaattggatgtgactggcaatcccccagaacatcttttgctagcacgcttcatctcccaaaacctggcctatttcgactacggtcaattggctgaattggtgcccaccatcgcttgtatggagcgtatcgtttcttcgactggcactattgttgcacacgcgattgagacggacatatccccgaccccgattggtccgcctcagttagatgcatcaaatgacacggcgccagggtttgcacctgaggtgcctcaatcgacgatcgtaccgcaacaagtcaaccctgcgaccttgagattgctggcaactgctgctgcatcattgtcaatgctctgggaagcccgaactcaccttcgtcgtctgtacggaatcagtgcccacagcaagaacaaggaagggaaacctgcaacaaaggatctcaataaaactgccacgaaggtgcacggtgtgactggtgacaagttctgggaagccattgccaggaacatgacagccctagatagcgaggaagcgatgcaccaaaaatgccgagagtttgcaaccctactctccatcgacgaggagttcagggtggatggagacgaggacgcagaaggggatagcctggacgctatcggagatatcgacgagacggtggctccacggcccatgaagcgcaagagctccgtctccagctcgaacctcagcaagcgacccaagggccggaagagttcaaccggaaagaagaagtccagcgctgagccggacgaggacctggattgggactgatttcgcgtagccacatcatcatacaggggattttttattttttcttaatttgcatgtcaagcgaggtcggcgtctatttattttcctctgcacaggagccatcggagaagggcctttttattattttatttttcgagaccgaaatgggtggttgctatgtttatgccctttttcatacacgctctgagagctcggcccgatatccactccccttagttatgagtatataatagaattccacggattcgttttccattggtacacaaaatagtgacttatctagatatagttgtcggtgaatctacaacggagcccggagctgtcgtatgagttcaaagttttgatgccgggttcccgagtagctcctggcacgtgacgtctccaggatgacgtcgccgacgatagttccgtatccttgttccaggttcataactcttgtgaggtaaacgtctcttttttctttttggtttcagattgcttcaaagtcgctcgttatttgagtgcatgggcggaccatgagctgcttcaatctcttcccatcgcctgaacatcctctaaacaagctccccctcctgttatgacaatgctgaacgcgatgctgcgccggacccgtgcggacggcgtcgcactgaagtcaatgggatcattaccaggccggattcataccccgaaaggcattttttatattccgccaacctctgtcccgctccttacacactccttgtcggcgaccggccctccaatggcgagccttggagccggtctcgatgccgatccgatttaaatcagaaaccgcagctaaagctgcatcttggaaacaatcccgcactattactgctatacgcaaagtctttacattctgcgggttcttcattatcaccaccggcgccgtggtagtcgccttcttcatctacgatgctagtacataccgcgaaggtgtcagtgcgatggatatcccagtctcggaattggccctcaatcctcgactgggaggcccaaaaaacctgccaattgccgatgtgctggttggcgaccatgattcggaagctatgcttctgcagaaggataagcctcgtctggttatcctgggaacgggttggggtagcatcgcgctcctcaagaacttgaaccctgccgattaccatgttactgttgtttcccccactaactatttcctgtttacccccatgttaccttctgctacggttggaaccttgggtcttcggtcactggtcgagcccgttcggcgcattattgaccagattaatggtcacttcctcaaggcttccgcggttgatgttgatttctctgggaagctggtggaagtatcccaagttgggcaagatggccagacaaagaacttctatcttccatacgacaagcttgttatcggagtcggtatgttgtgccaaagtacgagctggctcaagttccaaatattgacatttctatgtaccaggctgcgtaacgaacccgcacggcgtgaaaggccttgaaaactgtaacttcttgaagacaattgacgatgctcgtcaaatcaagaacaagattctagacaatatggagctagcgtgtctccccaccacctctgacgaagagcgcagacgactgctgtcctttgtggtatgtggaggtggtccaaccggtgttgaatttgctgccgagctgtttgatctcctaaatgaagatctgcttcactctttccctcgcattgtacgaaacgagatctctgtccatatcatccaaagtcgaacccacatcctgaacacttacgacgaagcactctctaagtatgctgaggtatgttttctccaatatctgaacccttcttggcattgatctgatattaacgacttatagcgtcggttcactcgcgatggcgttgaggtgttgaccaacgcccgtgtcaaggaagtgcgtggcgaccgggttctcttcacccaagtggaagacggcaagaccgtcgtaaaagaaatccctactggattctgcttgtggtccactggagtttgttagtgcaccaaccacattactcaacgtactggatctgacaacaactgacatctttttagctcgagccccgatttgcgaaacgctctctggcagattggaatgccaaaacaacaaacacgccctcgagaccgactcccatctccgcgtgattggcgcacccctgggcgacgtctacgcaatcggcgattgcgcaacagtccagaacaacatcgcagacaacatcgtcaggttcctccgcaccgttgcctgggagaaaggccgcgaccccgagaaagtgcacctcactttttccgaatggactgaattcgccactcgggttaggaaacgcttcccgcaagccacgaaccatctccgtcgcctggatcggctcttcgagcagtacgacaaggatcactccggcactctcgactacggcgagctgtccgagctcctgcaccaaattgacaccaaactcacttccctgcctgccactgcccaacgtgctaaccagcagggcgtgtacctgggccgtaaactgaccaagattgccgccgcgcttccaggtctcaaggccaacgagatcgactacggtgacctcgacgaggctgtctacaaggcctttaagtacaagcacctcggaagcttggcgtacatcagcaacgccgctgtctttgactttggtggtatgagctttagcggcggtgtcattgctatgtatctttggcgcagtatctacttcgctgagagtgtcagcttccgcacgcggtgtatgctggccatggattggggcaagagagcgctatttggaagaggtatgtcttttgttttcttattatttctccatcaatgttcgtgctttgctaatgctttcaatctccagatctcatgagtttttaaggtcatgagtttttaaggaagctaatgttggccttcactcgtgttccgtcattggtcgttgatccagagacatctgggttggatttttgttttcgatattcggcaggcaacggcggacctgtaaattactgtatccggttagttttgccattttgggcttagtacctcaacagctgtcccgtaacctcacttcaatgctctccgacataaaagacccgtcttcgctgctcttcctccctttctctcacttttccattattctgcctctctatcttgcactcatcgccgccccatttcttttactctagcccccaccgactaccgcgcatttgctttcagccccgacgcactgcccctttcattttaccggagatgtcgctcgatccgacccccagctcgttctcgcccctagaatggagcgtcgcctaggggcagaatcgctgggatgatccagcctacagccgcattgtgtgatttcgtgtcgatactcctactaaagagagtgactgtcaatgctacgaagctacatatgtatctaggtctctatctgatagtgcgtattgctcgtctctaagcccgccagcctccttcatatctgcaatgtgtcggtatacgttcaataccgcatgccccgcttcgtccgccccatctaaggttacattacactacccccgacagactgggatctcggttacctagtcgccaatagcctagtcgctaataccgtagcgcccatatatcgttattgtcggtctctccggtcgctccacacccagtcgataaatattcgtaagcacggctcggtgatataggccaataacgaaaataccgcactctcggtctcagtcgagaccatattgcggctaatgctagactacgactgcgaaaaccataccacgatcccaccgtcacctatcgaatagctaataggatgataactagccgatgactagtgtggctatatatcatagcgttatcgatcgaatagagaataggctaataactagtgcgggtataacaagggccatccgcgagggaagaggaaatttttaccggttaactatatcccgtggttgttagccgtgaaactagcatagtctcttatatccttagctaggccagatacgtcctcgcgatttcgggctcccgcgaggggagatcccgatttgcgtgcagttcttaattaatctgatatcgaaatagagaggatagctatagtacaaaacggccgggtcatacacgcacaaggcagatctatatatacatcgcgactcgagtctcccagatagaactattactaatatgccttaaagccagcgtacgtctttggctataggtatgtcgggctactcacgcagccgcgatcagcgagcttaattaaagttatccaccggagaatctagaccggcgcccgttggtagaggctgctagtgacttatatctggcttttatactagcagaactagatttgcatcattcaggtaggcgcgactatcctctctgttcggattgttccccttacacacaataggcccgcccgttgccgtaactaacaagctggagttgcaccgataccgtaccccgtcgttaggagcctgtgacgagaccgacaaggatcctactccgcccgaagtcagcgttccttgcacgcatgtcttactaccaccctcgccgaaggcctgccttcgcactcatgactactaggaggatacttcaaactacacgccatctaccaatctacagccaattcgcccgcccaagcgttacccgcccgaccttctttcgctttcccttcgaacctccctcacgtctcgcaaagtccttatctacatcacatttcaacacaatcaggagtctctcaacatccaccacaatggcctctcgctcaaagcgcgatcccacaatgtattcctttataaatggggctgatctggtcgagggacttctcaaggaggatggattcacaacctggggcttcgtgatctttcgttgcacgtaccacaatgactctgactgggagaacttcatggctcgcatggtcggcgccgtctcagaagacctcaaggaatacagtggccttgatctcctcgacacattcgccccaacggtcttggaagacccctcctttgagggtgccacggttgccaccctacgcgagcacttccatcagtggaagaagactgcattaaaagaggaacagggcgtgagcgaagactacactccaacgagcggccgataccgcttcttcatcaccgtggaccaggaggctatggagtccgttctaaatacccccttgggagggttcgaagaatatgaattagggcatgtccgcatggttaatgctgaatggaaatggacagatgtgcctgaagaggactctgaggacgaggatatatcagagcctgaggagttcgagccccttgaagggtgtactgaggatgacgtgggctggatgaacatacgctggcgtattgtgcagcttccgggattccacaagatgactgagattgatgactggcaggcgtattatgtccggtatccggggatcgcggacataaattgatatctacccgtgctagaaacaggatttggtatacctagcactattaaacagtttcttcaatcgcgtttgggttgaatgagctagtagcctgggcgccgcgctagctggacgtctaaagttacgggtggaaaggcggccgtttctggcgccaaaagtggtcattttcggcgtcatcttcacaggtcctcatattctagttgtaaaactcgcccataaatttttttgttgttgttttatcagttttcatagccacacttgattttatttgcgggtggtcttattgggtgaggccgctgtctttttctgttctggttgttggtgtacacatgcagtgtttgtatccattctgccatttcttgtctcaaatacgatcaagtgatcgcgcctacggaaatacattgtcgaggacaaagaaatatacgagaccaatgcatatgaaaaaagtcacttgtattgcaaaagggtcgtaacccccatattggagccagcgagataccatcgcccgaacacctagaaatgtagatccgagacgccgcgctagaaaagccaaaaaaaaaagaagggaaattccgccggacaggacaggggaaacctgactgacaatcaaggccagcttgagaaagttgtatcaagagatcattggatcaacgtcgctgttgttcgacatcaaagtgtcacgaatgttagtagcaaggtcattactgttactgttgtcgtgggaatcgccgaccaagccaatgtccagggtatccggaatgtcttttttagcctcccgtgccttttgctcggcgtatgcccgggtcttcacaagattgcgcagccgggcctctttacgagcgccctggttctgcagaattgcctcgttgactcgggttgcgatttctttacggagcgcagggtctaggagcgacgcaagcgaggaatccagtttatcactggggaaaataagaagagcaagggtccgctcgagatctgccaggaactgtgggtttgtaggagcgcgtggtgcaagttgtgccgtcgcaaaatccagggcaggagtaatatcgctaccgggagtgtccatgcaggtgcggatcaactcaaccagctgcagacgcaggagagagaagtgcaatgatgggtcttcgtcaaggatctattgaagtcttgttagccatggcacttgacgtgaagtgtgtgatatgctggtaagattcaatatttttggcagttgctcatactgaggactgaagatgtttgtttttctgcaaatgtcccggaagggagtttaagagtggtgcatgaaacttggtataatcatagcaagtggggccagagaatgtgaagtagactagtgggaaaatttcttacctgagggttcagctcgttgatcttttcaacggccgactggatatcaccagagtgaatcgcagtgcgaatttcaacccgctcttgaatggcttcaagattcgttctgagctggatgttggcctctactgcaaatttctttgcagcagcgggatagccattggtgatgagataatccatgaccaaatagttgatatcactgcattataattgtcagtaaccattgattcaacggatgagtgaaatatttgcagtggtgacgtgaatcagaaggataagtcaatttgttgctcctcacatgttttcagagagattcccaacttaagttaaagaacatcatgtcacggtgctgggcaggtaggggtgaacagaagaaactcacgttttggacggcttgacctcctcgagcttccgctcgaagtgatgccaagtaggcgtcgcagtcgagggagtgcgagacatctgcatagtgttaaaaggccagcaaccacgggtgtcaaaccgagaagcatacaagattagcagacattatgagctagatagccagtcttgaatctgatctgaagctatccgaaagctatccgaaaagctgaaaggcaacccgagagacgaaggccatggggaaaggcaaatcgctgtgtgggataagaccgggttggatgcgaaagagaaaaggaaatgaaaagctcggggcggaagaagtagcttaagcgaaagtaatacgctaatcccaaatgagtgattactcagaacatgagtaagcagcacgtgagcagttaccttggaaccttgcagcaaataaacctcgactaacccgctttgggactagaagattaggtaattattgtccccacctgggcagctttcaaggcttgtgtcggatcaaaaaccagaggggtggagagggtcaagatacctacaaagtgcagccttgtatgcggcacacgtagacatggaatcagtttcacctttatattctttgtctaccgaagtgcactattctccaccatggcaggacttgagcattatcggcattgctggcagctctggctccggtaagagctctgtggcaatggagatcgtcaagtctttgaacttgccgtgggtggtgatccttgtaatggtacagctcgtggaatccaatgcatcttaatttgcgaccctcttgttctaatatattccatacaggactcattctacaagaccttaactgctgagcaacacaagaaggcccacgcaaatgagtatgatttcgactgcccggaatcgattgacttcgatattctggtggacaccctccgtgatctgaagaaagggtaaatttactgttcgtcctagtcttctatttgacctgactggttatcacacagaaagagagcgaacatcccagtttactcatttgctgagcaccagcggcagcccaatacgaccactctctattctcctcgtgtgatcattctagagggtattttggccctccatgatcctagaatcgtcgagatgttggatgtgaaggtattatggctccttcgctatcctcatgcttatgagtgctaattcaatggcttagatcttcgttgaagcagatatggatgtgtgcttaggtcgcaggagtgggttgccccgatcgtgataccttaattccactgacgatgtatatagtcttgcgtgatgtccgtgagcgagggcgtgacattgaaggaatcatcaaacaatggtttgaatttgtgaagccttcttacactcgatacgtggagcctcaacgccctatctcaggtcggtaatcacatgagtttgcaaagcgtcaaaagactttttgttaactttaaatctcagacatcatcatcccacgtggcattgagaacacgaccgctatcggtatgcaatccctttgagctgctaatcttgagagctacccactaattggtgtagacatggtggtcaaacatatccaacgcaagctgcaggagaaatccgacaaccacaccgaagagcttcgcaaactgggtttggttgcagcagaagtagagctgcctctgaatgtgcatgtcttgccctcgacaccgcagtttgttggcatgaatactattctgcagaacccagaaactgagcaagaggatttcattttctactttgatcgactagtttcgatcttgattgaaaagtactgacctccatctcaaaatgcgcctttagttactctgctaacgtcaccatcgcagggccttggatatgacattgtatgtatccgcaaatgtggaaacaccacaaggcaacacatacctcggtttacatcccaagggtaccgtatcagccgtggctatcttacgtggtggctcttgcatggagaccgcgcttaagcgatccattcccgactgtcttactggtcgcgtgctcatccaaacgaacgagagcaatgaggagccagagttgcattacttgaagctcccgtcgcagatcgaggagcatgcaactgtcctcctaatcgactctcaaatgtccagtggaggtgctgcacttatggctgttcgtgtcttgattgatcatggggtggaacaacaaagaatcgttttcgtaacttgcgcagcaggagaacggggcctcaagaggcttactgctgtttatcccaggatcaatgtggttgttggacgcatcgaagaagagtgggaaccgcgctggatagaaaagcgatacttcgggtgctgaaattttcattccattgttggccccttccacagtatatatgttgatctgctcactatgacttatttctgagaccaagcattggattactgggattgacacttagcaagagcatacttatccatacgtttcatattcaatgaaatctaagcaaataccattacaatttttcttgtctgaatgtctcgacagtagggaaactaaagaaaaataatagacttaccgttttgagaatacacgtgcctgaccgccctgacttcggcgggcagaaaaataatttatcggtctcgattattttcacttgctgaatccgacgacctctaccgatattcaggcattgaaaatatttcttgcatgcttgtggtgtgaagtgatattttcagcgctcacaatggcaggttcagacaagaaaaagtccaaggctggcaagcccaaaggcgaagctggtccagcgatcagtacgtacagtcaaaacttaagacttgtttccaggaaaccccatgaccatgcttactgactatttgtgttgctatagcggatcctagatttgcgaacatccagaccgatcctcgctaccgtcttcctagcaaacgccagacccatgtcaaactcgataagcgctttgcgcatgtgctaaacgataaggatttctccagcaacgctcctgttgaccgctatggacgaaagctcagaaaagacgacaccaaggaaaaattgaagcagttttaccaggtggatgaggatgaggacgaggatgaagaggaggacgaggacagtgccgacgacgacgaagaagttcagaaagaattgaaacgggtcaatgctgcctcatatgatccttcccgtgatggtggctttgagtcctcgtcatctgaagacgaaacatccagcgaagaggaagatgaggcggaagaggatgtgatcgagttcccggacgagcagcggtctgatgtgccgcttggcgaagtgacgaatcggatagctgtcgtcaatcttgactgggaaaacatccgtgccgaggacttgatggcagtattctccagtttccttccatctggggggcgggtgttgaacgccacagtctaccccagcgaatttggaaaggagcgtatggagagggaggagattgaaggtccgccgaaagaaatctttgcctccgggaagaaaaagaacaacgacgacgacgactccgaagaggaggaacttgactctgataaggaggaggaggaaattaagaagtctatgctgaaggctgatgatggtgaagaattcaactctacacagctacgccggtatcagctcgaccgactgcggtattactacgccattatcaaattttcatcgaaggaagtcgcaaagcacgtctacgatctggtggatggtgccgaatacctctcaagtgccaacttctttgatcttcgtttcgtgcccgatgacactgacttctccgatgacaaggctcgggatgagtgttctcggatccctgacggttacaagcctactgaatttgtgacggatgctttgcagcacagcaaggtcaaattgacatgggacgcggacgacaaatcaagaaaagaagcccaggcacgtgccttccgaggctcacgccaggacattgacgagaacgacctgaaagcctacctcggtagcgatagttccgagagcgaagattcagacaacgaggacggaggcgtcgaagttgtggataatactgcaggagaagctacgactacaaagctatctaagaaagaggccgagagacagcgcatgcgtgcgttgctgggtctgagcgccgagcctacccgcaccaaagcggaacgtcccgtcggcgagatggaggttactttcacatcgggcttggctggcggccatggcaaggacaccatcttcgaaaatgaaccggagatcgaagaaaccacaattgaaaaatatgtgcggaaagagcgtgagcgcaaaaagcgccgaaaggagaaactcaaggcccctaaggcatctgcagaggagggtaccacagcggacagtgaagacaacgaagctgctccagccgaggtaccacagcaagaggaagaagaaatgggattcaatgatcccttctttgacgaccctgatggaaaggctacagcaggtgctcgacgcaaggaggagagacgcaagaagcgtgaggaacgtgctgccgaggaagccgcctcagctgcccaacgggctgagttggagctgctgatggtagatgacgaaaaggtcaacatcaaacacttcgacatgaacgagatcgaaaaggctgagaagcaggcccggaagaagggcaagggcaagaagggcaagaaggtggagcctgcccagacagatgacttcaaagtcaacgtcagcgacccgcgtttcgcacgtctgtacgacactcatgatttcgccatcgatcctaccaacccccggttcaagtcaacttccggcatgaaggccctgttggacgagggccgtaagcgccggcgtgccggcgatgacgcggaggcggaggctccaacagaaagccgggataccaagaagaagcagaaaaagtccccgaaggagtctagttctgaggagttgaagcgactagtggcaaaagtcaagcgttctcactgaaagtatagtcgaactgaaatgatttggaagttaatatacactggagtccaatgaaaggagttgaattgtgaaataagatctcttttacatatgtacattggcaatatgagaccagatgcatagcagtaacatgcggtctagaatatgtaggtgaaagtcaatgtgacggcttgtgtcaactttctacgatggaaaacgggaacggaaacaggaaacaggaccggcccaagggtacaaccacgtggatagaatagcttagtagtcaacatggagagggttttgtttcctctagggtcggggtgtttacaaacatgattataggggccagtcgagaggtgtggtatctggggttgcaagcatgatgcttgtatcacacgaggtatgagtgacggtgagagatggcatgtgcccatcatgagtaatatttgggagataaatcacttccctccaatcccaaattgagatccgcctcaaatcacacaaatcagcgcccccgagtaacacgattccttgtaaatccgactaatacggtgacaccaggacggtaggaaatagcgacatggtggccaatagtagtgattggtagaggtatcattggatacagttccgatagttggaaatagttggtcaggataggctattcctccgctataaactgtgtatctcgttatgtttccaaggggtgcacccagagtcagagaaacagatctataaaaacagacgaaaaggtcactgttgctcaccgtacaagatgaggctgagatcatgtgacttccttcaccgccctttcacattccctctccactgtctccccgggtggtttctctgttcaaggaactgggtcccttaagaagctctgggatcatttcatttgacttcctggttttctacacaatcctgatcagactgtggagtcctcgtgggtgcaaagccaattcctaaccccctaattgctgatcccagccccactgctgcacctcatcccaccttccactcccctcataactctggatattctcaattcccttcatcgtctgatgatgattcttgcttcgtcgaattaagctatgggtggatgcagcctagatattcctagctgcctgatacccatcgttacaccgcgtgaattcgaccggcccgttttcttttccctgcatccccaagtacctgttctctgcgggtttccctgttctcattcaccatgcttggccgactcttgagtaccgccgcgtcgactctgaatccggcggcgtactctggacgaagcaatggaacgcctctcgagtctgtgactgaagaggaacatacctccggtcttcttttccccgacgccagcctccttcgacgttccaatacccatgcctttccgttgcagacgaccttcaattcccccaatgcgtcgaccgctggtgcatatgatgatcgtgggggaatggaattggatccaattaaagattttcgtgtgattgttgcacaaaatgcattgggcgaccgagatgcatgtgtcttacttgacactcgtgcgtccgattcaccccccgccggtcttggaatcgatccacaaggcaacgatcagtccggacttagacatactcgagctgtctcaagtctttctcgtggaacacgtcgcaaccttctcactcaatcctccctcatcgaatcgagcccactctccgcagctgcagatgcacgcaggtcgtcaccagccggcccgggtgctttttcccgggctcggggccgtagctctacactggcgccaccgggaacatggcatgaccctggcccatcgcgacactccgccgattccaatgatactggccttctgaactgcattttcggaagcagcgccttcagctaccgggggtcctctacaaaaatgcacataatttccgctgatgaaagcccggcgactggggtgagtgcatcacctgctgcccgcagtccactttcccgagcctataccacagggagtccctcggctcctataggaggagcccgaggagtggacgacaagccaccatccaaagtcacagttctcttgactcgcatgtttagtgtgaatcttccggaaggcgcggaagcatcggctgagcgacatgactatgccagtgctctttaccaagagtcattgcccgagatggagttcccattcccggatgtttctaagcgcaagaaaatcaaggagaagaaaacaccgatgtacgcggttgcaattacaattcagatcccgttgctgccacgcaataccggacgtcctgtatcaaggtttagtactccaggcccagactctcctcggccagggttttcaagctcgctggattctgatcaccgctggccgggtgggttttttgatgatagtctatcctctgcctcgccgccggctagcctggatgagcgcctggacttgttagttgatcactgggacgtcatcactcgtacactctcccacctcgaaagacttgttcgcaacgaaattctctttcttttgaagaaggtggactctctatccgggccacacccgaagcctgcgaagcctcccaatatgcaacggactaatcagaccattgtgcatttacctgccaacattctatcggtcaattcgaagctcaaagaagaagccattcgcagctcccgccggatcagtcttgctcttcaaacgccatatgtggtcactggacaaagtcgttggggcgtctggcgggaggaaggccgctcgattgtccgtggtcttggcgacaaagagcagaactttttcttcttggtcgtcttgacagcatttttggggaaccataccgagtggctcaacagccttgggcccgagtggtatcgtcgccgccatatccagcagcacaaagctcagcaggatggcgaactcattcttgcgaacagaacagtcattgtatgcccagataagatgactgctcgtcgcctcgtgttcttactagcagctttcttgccctcgaagcaacgactggagccgttaccttcccctctgagacctggcacatcggcctcaatgcgtgctatctctcaaagcccaccgaccgtgcctgtcctccgacaggagtctcttcggagagcgatcgaacgacgagctcgtgctcaacgaatgatcatgggcgataatgatcatcaccagcgatcagtgagcgtttcgtctcaggagacagcccagcggtcaatggatggagctgaaataaccccaccagcggaacaatcggcctcggcccgcagaggatctgatgctcgctccatcaaaccccccggagcaaatatccatccgaaggatgctcgggccatgaatacgagtggggcaactacttctatgatcactcagagcagcactgttcctgttccccattttacttcccagccaagccactccacccaggccagaacagagcgcagcgcagctgaaggcagcgatagcctagcatcggagactctactgaagagtcttcagcgaagtgacagctctgcagtgagcacaaacggcagcttttcctcagctggaggccgctggggcggtattttctccggtctttggagctcccgccagggctcatctacagacggtaccgagccatactccccatctgaagctcgcaaaaggtccgtctctacaatatctggtcctgctagacgcgggtcaaccactttgactcaaatggtgaaggaagtcacagaaaatgaagatgagcaccggcctgaaacagcccccagtggaaacatttcgattccaacttcttctgctgctgctcctcacaatgccgagcccgcctcgccagagccatcatcgctcaccagccaagttcgggagtcgcctttgaagttatcagtccgagcagaggaaggcgtggtggacgttgaccttccacttccaggtttcatgtcactttcttcatccggtgattcgactattgcctcgccaaagaagactagaacatccgttactagtatggacgcagttgcttctacgcacagcagtggctccggattccccggtaccatgaaggatagcgatggaccgactgcccatgtggctggttggttgaaatttttccacgaggatttctcgctccaagcggtccggccttatgcttctcttgaagcagaaatcaaacaagcaatgcgggctgaaccatccccgtacatcccctccacatctgatgtggacggatcagagaaatgggtagatgttgcgacaactttgattgcagacaccaaggcttccacggtgaaacgacttcgtttgcgacgcaagatcatagtgggtcacaactctggggcttctcatacgccttctccgactgccaacactaacccgcgtggatctactggagctgcctcggcctcgcaattcgccagcttcttttctgggcatgataagccgacccacggccttggtactgatgaacgggaccagagctttgtggaagagcggttcgtcgaggagcctgtgatggacctcgacggagttctagttgacgctgttgagcgtgtcttgggacagagcggttactcctcaatggcacagtcacgtgccccttcgcctaaccgtgctcgtagagctgaagacaaaggcccctcccctagaggcgatgaagcccctccccttgaagtgcctcgcggtgaatgccgcaagatggtgcttggggccctcgaagaagtcgtccgccttgtcaccgccgaacactgccgtgaagatgtggacagcacactcgggcttgccgaccgcgagcggagaagagcacaatcaggtgttgataatacgttgcgtgaaggaatccgcaagtggctccttgacgtcgaagaggtttggtgattctgcgttaatgctttaccaggctttgatttccttacgcttgctgattgcatattcgttcctattgcattcgtgcattgttttttgattctttttttcctttcccccgcccaatagtttctgatttggtcttgcctgatatgggtaccagacctgggcttcgggggtttgattctctttctgttctttgctttctcttgcgtttcttgcttttgcttgcttttttccggctctgcctcttgcattgcgacctgttttgaatatgatacccacctacttcatactgaagtctagttctgcttgtgggggctcctcccctacgtttttaatatgagtcttgaccaatttgatgcaaatgacataagttccatgaatctcattctctatttgattcggatctaggcgacatagaccaatttcacactgtggccacttgcttcaaccttcccatcctcagtaggagcaactcgaacagtcttcaagatctcgtctgactgggccgaattgacaatttcgactgtagtctcagcccgcaggcgcccattgaccagcaactcaattcccgacaaggcatcatcctcaggggacttgatcgtgggattggtgacagtaacagagccgggacggatcaagatgggcatggtatcaaagccatgagtctccgtgtaccatcgaccagactcataagacttggaatgatcaaaccacgagatccatttcccagcttcatcatcagaagaccgaggcacatagaaagtaacctcaccctcctcggtaaacaccggcgcaaccagcaaattcggcccaaacatatactgtgtatcaatcgcatacgtattgagatcctcagggaactccaagaacagcggcctcataagcggcgtgccggttccatggcccttcagcgcctcctgcagaatatacggcgtaagcaagatcttgcgcttaacgcagtcccgcagcacatccgagcaatcctccccatagatccacggcacccggaacgaagacgatccatgcagacgcgagtgtgtcgacagcagcccaaactgcacccatcgcttgtacagcgccggcggcggcgtaccctcgaacccaccgatatcagacgcccagaagatatatccggacagcatcagactcagtccgccgcgcagggactcggccatcgcctcgaacgtgctctcgcagtcgccgccccaatgcacggggtacgcctgcccgcctggtgcggtactgcgcgcgaagaggagaccctggtttcgtccgacgcccttgctgagtgtctcgtacacaatcctgttgtagagcagagcgtagtagttgtgcatgcgctcgggatcggcgccgttgtggtattggacgcccttgactgggatgcgctcggcgaaatcggtcttgaaactgtcgacgcccatctccattaatcgctccaggtgcgtgttgtaccacttgctggcggcgggattcgtgaagtctacgattgccatgccggcttgccacatgtcccattgccatactgagccatcggtgcgctgtggattgttagtggtggttgttttgttcttttgtcatttatgtgccaccctctcggaacataccttgatgaagtaaccgttcttcttgccctcttcaaacaatggcgacgcctgtacgatgtacgggttgatccagacactgatgcggagaccgcgctccttgagacgcttgagatatcccaatgcgtctgggaacatctccgagtcgaagtcgaagtcgcaccactgatacgacttcatccagaagcaatcgaaatggaagacacccagtgggatgtcacggtcacggaatccatcaaggaacccggtgacggtctcctcgtcatagttggtcgtaaagcctttttatagatgtcagcttcttccatccagttttccggagcaaatcatatcccaaactcactcgtagtaagccagaggttataactccatgtcggaaccaaggccggcctgccagtcaaagtagtataccgattcaggatatccttcggcgtagctccatatacaacgaagtactcgacctcctcgccaggaacggagatattgacgcgagtcgtgcgctcagactgcacttccagactaaccttgccaggatgattgacgaaaacaccatatcccttcgaactgatatagaacgggatattcttgtacgccagctcggacgaggtaccgccatcctcgttccagatatcgactgtctgtccgttcttgaccagaggcccgaaccgctctccaagaccgtagaccttctcgccaacgccgagatcaagccctgcgagcatatatccctggcgctcggcgtacatgccatcctcgtagcgatgtttctcagtgcgttgatcgcgcacgtatccgatagagcggaatgattgaccggtcagtttcttaccggctggagactggaattctagacctagttcattggcggaggtgttcacagccagattgacgggcccgcttgtgtagttgagtttctttccggccttgtcgtgctcgatcttggtgtgtccggtggtcttgttcaggtggtaatgagggccgttgtcgttttggcccgccctgtgtgcttttagtgattgctaacaccagcattgagagcccttgtttgagccctcgatgtacttaccagtgcacaagcttcacaccgatgactccctccactggcgaggtgacccgcgctgagacagttgctgtatacttttgttagcttttgatttctatactaagggaggattgaaaacctacgcgaattgagggtatgtcctcggtgtgcctggaacttgttcaacagcagattgaccgagtcgtctccaatggagaatcgctctacgttgctcatccactcgatgctgacgccatcctatatgatccgattgcacgtcagcattgattcttttattctatggcaagttcaataagaagcgatcggaattacctgcaggcaccacatccccgcagtgaacttcatcttgggagaaaatgtagggaatctcagttaagattcttattcttgaaatctgttctacgcaatttaccccagagatacctggtggctatctttcagctttgtatagaattgaaaaaagtagaagaaagaagaaagagaatgacaagaggacagtcaagctctatttgttttacgccaacacaacctgggcaggctaacctgcttcatttgacacggtgtattgtccgccatggcctgattctgaatagcgcgttcgccagacatctgctttctcgggagttcggggtagtacatcaccgttggatcggaatgtctcgccaaccagaacgagcggttaaaatgtcgcctgcatggaggatatcaggctaaattgcgggatgtcttaccttggagttgagaaaaagacatgtgttttggattctctcgaatgaatacgtctgctgtagatacctaggtagctagtagaattccccttcgtagcagttcactgagagtgcccaggtggttattcaatgagtcatcgttgccaaggtgtttctcgtaaaaccaccggcatcgtacaaatgacacctcttttgctcgaatatcctgttagacatggcatcaaccgatcctctgacatcctgggagtctttcgcccattcttgggataaaggaatgggcgacgaaggaaatgactatttccgctttctagaactccccattttggagaaactggtcggcaaattagaaggatgtcgtgctatagaccttgcaacgggaaatggccttgtagctcgctggttagcccagaaagctgcttcggtcatcgcgaccgacggcgcagtgtcgatgatcgatcgtgcaaaggcacgaacggacacttcccaatatgggaataggatttccttccactgcctcgacgttacaaagcagtcctcttgggatactttcatggccgatactcgtgtcatggtcagttcacaagactttgtatagactatagtcttgcccagattttaacgcacttgcgtaggaggacgggttcgatgttatcaccatgaatatggctctcatggacattcaggatctagggccattggcaagattactgaaacaactcctcaaaccgaacggttggtgagtgctaggcgtttttgctttcgaccctgaacctgaatgcttgtgcaaactaatagctatatctcccagcttcgttgctactctgcttcatccgctctttttcacatctggtgcagctcggcagatagtaatccatgaggatccagagactggccagcgaatcgtcgaccgttccattgttctaaggaaatatttgaacgtccccccggcgagacaattggtttttgaaggggagaccgagtccccggtatgtgactacacgtagaaacctttcctgtcttagggaataacaggactaaacaacgcggtagtacacgttccatcggcctttaaaccagctctttgcaccgttcttccaggcaggtctcgtcgtggatgcacttgaagagaccaatttcgacgaaagctttcgtgattccctacgtgaacacgcatcgaggaattttaccgaatttccaaaaatactcggcttcaggatgaggcctgtatctgagatttagatggacaggctgaaggaaatcagatacatcgggaattggttataatcaagtccggctcacggccacttttcattcacagaaacaagtacatagctaacatcgcatttcatttgggtacaaaatcatcagagcgtcaaatgggtatcttcgaatggttagatcaagggtcgtaagctgccactcctagggcttgcattgtagctgagactttctcctcgagcccggacacgcgaaacttccggtgacataagtccctcgcgcgactcgcgggtaatccgggatggcaacccttggtgcggcgagacaggatgaccgaccacgctggcaggaagctcgagcgacgggatcgatgcatccatcaggtttgtggtagtcgattccaccttcgtggatactggacgagcatgagactccgagtagaacttctctagttgggctgtgtcgctgcagaactcggccaggccgttaaggatgtgttccggagcacggtacaggtttcccgagtcagtgcttgctgatccaggggtaagtgggctgccgatgttgccgatgtcatgaacaggccgggtaattggagaaagtcggggcgagacacggtccagtccatcgtgattcgttgcacggcctcggaagtcagaccgattgtggctgtcgaaacggcctgcgtctcgactcgcggtgctgcgggtactcaccagccgattcgcgaggaggaggaaatcgccttcgtcggtgatctgtgcgaggatgcttccggttcggtggatgtattgcgggtaagtgtaatcgggcttcccccaggagtaggatacttcaacgtctgctgggaatgccgaggaggcttcgaagtccagtacgaaatcaaacttccgcaatatggctttttggtagtagaggcgatctggtggacccgggtgcgcaaacgacgcattgttgaacactgtgtgcagtggtcctttgggcggcgggactttgagtttgatcctgtagggtttccggaatggctgtgtcttgtcgatagcacaggcttcggcgatcggcacttgtaccaacttcagcccgaatttgtcggcggtcgaggcccaagaaagtacggtatcctcgatcaacttgggggtcgtgctcatccaactgagttcgatatggaagcaattctccgggttatgcagtcggtcccagtgaaggtcgaccacttccggccggtttgaccgcttgcgcggatcaacgtcgaatttcatcgatttggatagcatgatggcgaccttgttcttcgccttggagggagtgttgggggtctgtggtatgcgctcgtcgatgctgtctgatcgagctttgaggctggcaggagagtccttggcagtcccgacagcgggagtcgacggtatagatttgtctgacctaagctgagggaaccagcttcctcgagactctggacgggtgacacgatactcgggacacacttgatagaaatagttgccatctcggaaattgtgtctcttctccacgtgttggaacaagccatgctcgattaactcgttgccaaatttgactgcttgttcacgggtatcgatatcacgtatgttctgcaatagccaggtcgtgaattcaaacccgatgaagcagttgtagtgtaacctccaatgccacctccggtccatcatccggacacccttctcgccttggataatttgcgccaatgacataagactgatgctggatctatccaacagttcggactcgggtaagagctgagcaggggcattgtcgagtcctggatcagtgagtagtaaacggtccagctcggccgtaacgacttctgatggattgcgtgtctggtacattatgttcaaaggattctggtctcgcttggggtttgacgtctcgaaaagcttttcctccggcgacacgtatttgtgtcgttgccagatatgggtcagttggctgatccccagcaaatgaatttcttcctcattatcctcatgagaagtctgcaaatttcgccgagaattgccatgaagttgaagcgggatcaagacgtaacggactcgccagaagtgcagctgctgtgctgggttctggagataatctcgatgaccagccacataattatcggcatagttccagttgtactcttcggaggttggatccagcttgatattcttcacttcatattccgcgctcaatattgttttcatcgccggttgatagagagtaaaggtaggcctcctgggagaagtgatcaccgcagagttctgatgcgtaaagcgggtcacttcaacttctcccccctggatgcagacaagtcggtgaatcgtgttgcccttggagagaaacattgtaagcccatcgcgctctagacctcggagatcgaagacgttcaatgattcaagggcgggctgtgaggacacttcggccacatgctttccaacaacgatttggaagccatgagaaagccgcagcgagatcatttctcgtaaaaggactccgcgtgtctttggtgcctcaatgccttcggaatcttcatttgggaagacacggtacggtgtctgtagatagtctgaagcaagcacactagctgtcggaaattcttctgtcgtcaatggaagcaccgcgggagacttcaagctcttccactttaccacggccacatgtggagggcgaggatacgcatgttgccaacggccaaaccagctggtatcccgcagcacgtctttaggagtattgcatgggttgaccgatcggacccacggagataaagctttgctcggggagggtcgcgagtgtggctcgtgtggactatggctgagagtgatctcgatcttgtggtcggtcagatgatcttcaccatggctccgaccaacttcattcgctggcgtttccaccggcagtgatccatgggggcctgccccttctggatgttcggattcctttggtgggtttttgggaggtattttgattgaaatcggcttagcaggagtctgggaggatttggctggtgttgaagatgtcgaaagtacatcgaagactgatgtagtggatgctgtttctgacggactcaaagaagtgatgctcctggcatcggaaactgacccggcaggagttctttggtttgtcatgggcatagcactggcatgttccacattgaccaccgtgctcgccaaggctctcgggggagtagcactcaagcctcgaagcgcaaagctaatcgtccgagaaattcgtgaggtcattggcgccggtgtctttttcaacgctggttttatgggagacatgctcttggccgagcttgggctttttggtgtagtcatattcgagtcaattcttcgaggtccagagtgcaaagaatcactctcgtccgctggattcgtttcatgatggcgaaggcgcgtgatggagcgggcagatagccgttcatgcaagccgcctccagcggcctggacttctgattcactgggtcgctttgccttgggcgctttggtagcttgctgccgtttcggagagacagcgaaaatattttcatcatattggtccatccaagacatcacttccttgcgtgaactctgcgtatctcgagtttgcgattcatcttggtctgccgcattttgaacaaatgaccccgggcgaagactatcactaagctgtgccttgagagatgagggattcctggaacggattttagggggagcacgactacccgggttataaccgggccaagacccacgaattcttgttccgcctcgcccttcggtaaggtaggggattgtgatgtttgcttgttcactctccatgactcccatcatttggatctcatacatacgcactcgtggcgtgaaagcctttgatggccgagtgacggtaagagagataggcgcattcgggtcttttttcaagattcgccgggcctctcggtatgtttcagggttccaataggagatgtcaagccaatgagggataccaaagctccagtctttggcttgtggcgttgcgcgttccctcattctagttgcagacaggtatgagcttggggaaagatacgatgatctgctaacaacgcttgaaagggaatgatgtatctcaggagacatcctatccctgttaacttcactgaatctagccccctccaaatccccggaatgtcgctccactggctcccggtatttgaagagtggaacagaatgcagaggcatcggactcaaacagaccaagtcaattgctatgcctcggttcgcaagagcttctgttgtagaagccaaggactcgtaagagacctcgaaaacgccgctaccgggggtgataacaatgattgaggtgccagtgtggaccatgtctcgatcaatatgatcgaaagccaggtgagcagaggcgagatgaattgcttctaggatgtttccccgtagagctgagcttgggtgcccagcaatggtcgccaggtttggcttggaggtgcccttgataccactgccagatgtagcatcaatgtcgtccggtttcaggattgacacatctcgcaaaaaggtcctgaattcccttttcagctcgtccagaatggttgtccaatggccgcttgccatatcatttactaccacacggtagaaatctcgagttggaactttgtttggtccggatttgctgttcaagttcccagcgccgagtttaggctggcttaaattgctggacctgtcatattcgactcgagtgaacagcacaatggtaaccaaatgttttgcgtccgaattagcccatctcttgaagagctccggtaggaaaccattgataacccgactgaagaggatgtctccagtcccctccgagtcaaagttccacatttctttcgacatttggatgaataggacatatttggcggactcgcttcggaaaatagggatcgtctttggcgagaaatatccggaaagacatttcttctctcggataaagatgtttttgacagtggctttgatgctccccataaacatgatcttttgtcctttgtatatgattttatctgacaactccgacatgactagtctccacatgtccgatcggaccatgtattgatcgcgaaaggcgatgtcgacgtgagacgccgcacattggtctcgatccacaatggataatagaacttgcgttctattcttgaaaccaaagatgttggcaatgttgtttgttactgaaatctctaactgaggattccgagccttggtttctggtggcaaggccttcaccacgaatagacaacggctctgcagtggagtcttgaatttcgaggtgttatccgcttgagacgccgagttgagttcggcatgactctcgcgaccagctttcgaagctgcctcgggttttagggtagaataaccagcatcgccagatccccgcatgggcaaaatctcgacgacatctccaacttgcacttcagtttcgccgaaagccgatggattcaacaaaatttcttcacgtgaaaacgtctcatcgtgcacccaaagcgcacattggtgccgtgtccagcttgctgaggacaacctgacagtccgatcatctgtggcctggtcgtggtcgtggtcacggttcgaagcctccagtgagtgggtggagctgctctccaaactcgccgcgctcacttgcctcaagtgcgaccgccgcatgggcccgcgcaaagacatttctgtatgccgttatgcttgcatttcactgcaactagataattcaaatatcgcaatgcgtccatgagtgcttgcaagagatagtcttcgcaaaggggagataccacggtcacgtgaattgtcatgatcacatgattttaatgcctgaggcgacctataatcctcggatctatgaagcatacaatagcagccgttgatttccagatatcatacaaattgaatcaatggggtcaatggacacccgtgggaaacgataatgaagatgattgaatcctggggagtctagttctgagccctaaatcccaggtttctagagcattccctgcagagcatgcatagaccgacctattccagccggtaggcgcatattatctggacaactagagactaagcatagaaacacgattttctagcccgtgctacgacatctaaactgtctcttgtagactagattcataacgatagccagctgtagaatcaaaacattccgtcgagaccgatgaagagataaaatttcgcgcctatggccttttgggatctttccaacgcccttttgcgatgtgacggcttgcgtcctaggtggttgtaatcccgttgagcaggtcaaagatgtggcttgattcccccaaaacaggtttctccacggagctattggcgccactgataagctcggagcggaaattccaatttcgcctaaaaaataagagcggagaagcccatgatgttcgtccttttgccaccctgattggtccgacgctattcggagttgatttccggcttgcccccaagccctgtccatcacctcctagctacgcccaatctgaacacctcctaggtaccctcaacacagagcttgcggagatcttttttcaattggtgtctggaatttgcctgcaagaatgacactgaatgatgactgaatgggtttgctgtgtctcactaacagaaaaagcaggagcaacgcattcccaagtccatccctattctcacatcctgaagcacctcgaggattccgaatcataactgctggtacccgctgagaacgtgtcgaggttttcttgtactggattgacgaagttggtcgttggagcttatgaaacttgaccatgcacccgcactgtcacgggaattggcagtgcggtgaaatcatggaagctgaagccacctcaaaaatggactgaaatcgcccaccacgcgccattaatcgtcatatccttcttccgtaagcatgccagggcttcatcgtgttttgatgttgctgatcacaatggttttttttgcttagtgcgcctcctctcggtatgatgtaaccgggtcatccatggatcaacgggccaaccttcttcgacaataccgcagatctgtcctccccaacacactcatagcctcgtggcaaaactgcatggacctgtcacaccggtcttgagcacagcttgcagtgacatacgagtaacaccacttcatgtcacggttcatgtcatggttatatcatgggtcacatcaatatcacggcacttccaatacgtgcactattgggaccaagccaaacccaaggctttcgctcacgtcttgtctcacctgtctcgcctggtttaaatgctaactgcagacttctggtactcacaaggcctcacaaatcacaggccgtgctaggattgctgcccatagcgaattacccgaaactcgagcaatggagccgaaaggacccggggtccggaaaagactttgtgatgcacattttccagctatacagaggaccggtcctttgagtccgtgtggttgggcttagcctgatcagcacgcccatttgcagtcgtcattccaacccgggaagaaccattcagcagcttacagctacgcagagttagtgaagcagcaaagccatcgtgtttgagcgtcgattctgagccttccccttatgggcggctccctctgttctccgaatgaacaggtaatgcgatatctttgctgattcattggctctttgtagctgtaagctcctgaatgcctggttggtctcttgacgaggcgctcttatgcaggaggacgaaggaaaaccccgcccagtcgcttacgacggccgcgaagcccatgatgcggagctgatctaccccgtacacgaggagagctactggccacaacaaatcagccaccaaattagcatgaccgttgacgagacgcaggatcagtctcctcccttcgcaggttcaccgggtgcttggattgctctgccgcagtgctgtagacattcagctgccccactgccagccgcagctgatagcgcaatcagacctgtcgacttgccacaagagacctggacatccaacaaaagccaattccgtcaatggggttgtggtggttgtcttgctgcggggaccgaaggacgcaggcatcagtgggtcttccattttgacgacggacgagtatcgacccacccgaaccgaggcaaggccaacaagacaacgtgattgatagaaaagcacccctcgacccagacaagccctattataatcttccgtgttccccgagtctgaaagctcaggaacgatattgcaaaatttcccaagaggcttgaagggggaggaacgcttaggtaaaccttaccgcgagcggtccacgggtatgtggttctctccaaaacaatgtcgtttcatgaaatggatccatgatgcaccctgtcgagtcctggaacaaggatgaatgccaacctatcaatgagatttggaatgatttcggaccgaaagagggcgacacgatttggaatgtccaaaccctccagaacacgagtcatggcctatcagagatcaggttccatatgactcttatggaaatcatggatgcaggttcaaacccaaagaatgaactaccatatatactccgtcgatacaacccgtccatattgaatgggttccaatgtcaaaattaccatccaacgtgcaaagcgaagcgcttattggccttagcgctattagtggcgaaccggcaaagacctccgacataccagaaggcccgattttggttgaaacccactttacgacaaattcacagtacggggatcgaccactttgtacggagtatttttttatttttatttttattttatttttacttttttttttaactctcgtgcaagggggattttattcttccacagctcttattgtgtggccttatgagttgatgttccgctagcgtctcgcgtttggcgaaaaatccttcaaatccttttgcagactatatcctaacacgatatggatgagaactttgccccgtattccgaatattcgaactatgcgaacctggaaaatgaattcaattatgactgggccgtccctgaatacccgcaaccttctccttttgaggtcaataccgaaatccctcgtgataaccgtgatcaccgtgatcaccgtggtatccgtgattatcctatatccaacacaaccgaccgcgtgaatgccaaggtggctatcccccggaacgcacaatcaagtagttggaccagcagtggtcgagtcagtcgagcttgtgaaaattgccgtgaacaaaaggccaaatgtagtggccatcgcccggcctgtcatcgatgtctggattccaatgtcccgtgttcgtatggcgatcggaaaagagagaagatggtgaagtaggtccatgggtaaacttttcacctgtctcaatacttgtctctaacaagtcataggcagctgaacgatctaactacacgggttgaaacctttgatgctttgctccgcgatctttatcccaagctggatgcctcgtcggcccatcgggtcgatgaaacactgaaggagttaaacgcacgcactccgctcagccaagtcctttcccctacccctgtccctgccttattcaccaacccaagcgggcatatcaatcaatcagtgctttcttcagatgttactcctatatctattccctccggggctgtagactacaccgaagaggactttgatcgtgatgaaaaagtccagtcgacggggtttgtgggtgaacattcggagatggcatggttgtacagactcaaacgcgaccttgaccatagcagctcgaaaggaatcgaacataccctcgaacgcccttcgatctcttccgtgaactacttccaagatgactcggaaattctggttctcgacgatatcgacctcgcacgccggcctccacaacaaatcgctaacaggctcgtcgacacctacttccatgttgtgcatcctaccttcccgattatggaaaggcaatctttctgaatcagtatcgatccttttacgcgaatccaaatgtgcgacctgggaaacggtggattatagtgctaaacctggtgttcgccattgcgaccagacactccttcctcatcgatcagcctcaaccaaattgcgatgatcatcagacttattttgcacgggcgtggaggctgaatgtaagtaacgtgatagatcatcccgacttgcaacaggcacaggtggagggcttggctgctttttacctcctatcggttggtcaagttaacaggttggtcttcgccttccctcccttccttatttatatgtgatctatatctaactatgtgacttgctcatccaggtcatggagattcattggaattgcaattcgatccgcagtggctatgggcctaaacattcgaagcgaaagcgagagcatcacccatttctcaaaagaacttcgatatcgggtttggtgggcgctgtttatgttggatatggtgctatgtgagacgacaggccgtccacctggcacgggggacatcttttgctccactcccttccccgttccctttgcagaggaggacttttgggacacgcgtgttatgcaaattattaccgacaaaagggctcggaatgcctttttcacctccttaatttccgatacggctgcttcaccatatgagagtgtgactcttaggacgccggaacagcaagagtcaggcaagggcaaacaagaagaaagggctagtcagagagagacagagaatctgacacccaactcctccctgtactttctgtacgcagtggacttggctcatctcctacgggaggctattaatatcctctacgctccaagagcaacgcgacagtcatggctcgagatcgaaaccgccattcccacactaaacaaccatgccgacaactggctgtctcttctcccggcagagttcgattttacaaaactagatacaacccatcaatttctacagcagcgtgctagccttgctttccaattctacgccaccaagctgataatcttgcagccctgtatccgccatctatctcaacagtcatctgaagcaagctccccgggaacagtgtgtgaccagatggcaatcttgtgcgttcaaatggcgggtcgaatgctcgacctgctgcctgaggagccagacctgacttggctgtatggcgtcgctccatggtggtgtatcctgcacaacatcatgcagtcaactaccatcctcctcaccgagatgttcactcgcactcatgtaggcactgccaaggctgtcgatatcactaagaagatcgacaaagcgactcgctggttggaagaaatgtcgaccagagacctttcttcccagcgagcctggcttgtctgcatggacctcctttcacggcatggatcgaagttcgggtttcggtgttgacaccgaactctaagcacacgcgttctccaacctgtctcatgtaattatgggagtttgatctataccccggcttgcttggcggaaagagtgactttaagcgatgcatctgcttttgcctgctggctttaacgacatataccatgcaagttttatccattacgcgtccctcgtcactttggaaattcttgttcatctgacgcctcaattatgatctcggtttatcttcatcaatactgttttgtcataagattgtgtcttgcatttattctcgggggtatttctgttcgcatgatagagtatcttgacctgaataccaccaagcattggagtgtcgagtcaattgacaactccactcaaaccagaaaagtttaaaacgtgcatatcatcattaatatttaatttcctggccaatcaggctcaaaattcatgacatgtatatagattctccgcctcgttgaagaacgcatcgacaggatgcaacagcccaaggtcgatatctgactgcgccaggaaatcttgcatagtcggctctagaaacgccatctcagtcgtgtacccactgacagtatccctcaagggatagacatatgcgtcggttccatggctgtggacaggttgagtggtggcagaagcaaggacatgatgtgtcgcgggtattaacgaggacgcgggtatagacgtcgattggttcagtggcgcggtgttcaggaaaggagtagtagctggtaaatccgatgaaggcccggacaaagccggtacaccagcaccagggggagaattacaagtagcactagcattggtattacttgttgaagcctctcttccagcagccacatcggtgttccccttaccgcgcctcaatcctcgatacgtagccagacaaaccttcacctgctcgaggttgtgatagaattcggccgcagccaaattcccattctcggtcatggagcgcagcagatcaagcgcggagtcgaacccggtcatatcagttggactgccgatcggaacgaagctagacattgccaggatcaacgctgaggagaagaggtagtgggcgtggaaatatccaaaggttggcatggacccgttgatccaccgtgtcaggatcatggaatgggaatgtcgcgctgcatggatacatgcttcgcttagggtgaggacgggttgggaaacggatacatcttcgctctccgcttcggtctcggccccaccggtattattggtatcggggtggggtttactctttttacttagtgtcatcaggaggtgcagtagtgttgggcgcgtagttaggatcacgcattggttgaaggccatgtggagcgagacgacgggtttcttgctcgattccaggtcttccatgttcaatctgagggactcggggagtgtttctacccagtttttcagggctttgaggagtttctgcacgcgctggaggaaggtctcttggtactttcgccgactgtatagacgggtgatggtctcgccgactatgcgtcccagcttgatgttggcggtcatgtattccgagtcggagagttcttcttcatggcgccagcgtggggagatggttgagggcatgtcgacgtggatatcttcatcgaggatttgcatcgggagacccattttggatccccacatccggtcgaagatgtagattgtccaccatatttggatgcggtgttggcgctccactgggtcaattagctgtgattctgggatattgtggttcaagccgatggtcaaacccatccgcatagcgtttccaatgagaatgtacgccgaatggcgccggttgagatagtatgaaaaaagagacttgggatatggtaagtactcttatgtcgaacaataggacatgctgagccacataccaacaataacagggtttccaagtgcgtaacactggttctctccggcagaatctggaccagactcattgatcgagcaaagtatgacgtgcccggtaccctggagccagaattgggctcagatcggattgaatacgcctggccgaaagcgaacagggcaaagaatttacacttgttagccgtgcagtcaaagtcttgtgtctggtagatctcttccagtttatctagtgtcgacttgcgcatcatgaggtggtacagatgtccgatctgatggattgctatccggaccaacaaccgagcatggtgaaggctcggccactggatatcggcttcgttcgctgtggcgattgtctcttcgcgctcatactgtgttcgaggaatatgtggcatcgcgctatttcccgacaagaaacgccgaaaccgtgttgcgaatgctgaacatgctgcctcgccgatatagatgggtggcgaagagggatcatacctgtggaaccaggctcgatctccaatcaatggattctgaatacctgttccatcaggggcatctgctgccttggaaggggctcttttgcgcaatctcagtatgtagttcatctttcgcataaagtcaagggatatctacctctgcgagtgatcgttggtctcggcaacttgagccgaggtgatcgaccgttccttgagccgctgattctctgcaaggatctgctctaaatagctggagaagatggtttagcttcctgacctgacacgtgtgatacgctttttaaaggcttggtctaataataacctgtggcttgcatacttctcactaactttcacctggcgatcccgagtggcgtaggcacattcatcagcgagtcctaccgtgcggcatttgctacacggctggtctccagaacatttgattttatgcgagtggcatctttggcagctgttgatgccgtgcgtcagtgcacggtgggttcggcgtgaggtatctggaatacgcacgcgacaaatttccttctttgggactcccgaccttgctgttcttgctcttccgtatgtctttttcgtgccatctgacaaattcccttatcttcaggcttttcaggtgcagaaaaggatgccgtccggatgcggtcggagatttgaagttcttacccgagtcttcggcaattttgggatttggccgagcttctgagaagctgactaatcaatttgctgcccacctgggcatctgggcagcaacccgtagatcttctttgcctaaatgggcataatacattgtatacctaattagaaacgagtaatgtgtctttaaatggtataatatgtttccttttgcaggctctatatggtcaaagactggtatcggattctatatttattatatttcacgaaatcatcatgtctgtctatcaccatctataaaccaactctatcatgcagacgttccatatcgcctaaggtgcaaagacataaatgcaaatgggaaaagaaatcgtcatatcgttgtcgtcaagtcttcgcatcgaggctgaacttcttttcaaaccatcgctgcatgtcaaggccccatttcgtgatagcaagcacaatgaagccacttgctatagcgaagaatacacctaaacggatggttagatatgtctcaatcataatctcattgagaagactcacagattgtaaatgtccatcctaccccaatagcaccgattaccggctcaacagccgccgtcgctgcggcagcaaagatatattgcaccatgtactttgcgctgatgacctccgaacgagcttggggcatgacctctgagagatatatagttagtttgtaagtaggacaatggtacaaaggtacaacactcaccagccgaataagtattcagcccattgaaagcacccagaagtcctacccccgcaaagaaagcggcaataattgggacaaccataccacccacttcttcctctaaggtccagcaataaatcagggtcgcacctgggaggaccccaaatagggtggcaagaccactgttcagtcggtcctgaggcagacgcacaccgtttcgtttaacaatccatttcttcacggcgcggtcggacagcttgccgccaacgacacttccgatcaggaagcctattcctggggagaggtagaataggccgctgacgaggggagacgttaggttgaaacgtggattgaagattgagcgggctgaggtgagaagtgcatattggaatgtagaaagaaggccacatgtgaggcactattgcttgttagtcagtccctcgataagctctggaggtactctggaggtaccgatgtggtactggcagataatgcttactgcaagaaagacattgggatagacaaatcgacgaaagatgcgcataggattgaacatgcttatgacagtgcaaagcttcaagggtttgtcggagtcccggctcttttcttggacacttgggacaaaaagaagagacaggacgaggccgagtagagtcattgcgaattgcaaccagtatataatgcgccattgagcaaatgtgacgatgatgccgccgatgcagggtcctaattgtagaataagctactgagatccgacaacgagcatagagatagtgatgatataacataccaatggcaggcccactgacagatccaaccataaagcagccaacagctgttccacgcacagtctatcaactcttgtcagtaacccgaagacaatgggaaccaaaccaacgtaccggttcaaagatatccgcaaggatagtctgcccagcaaccataaagaaagtgcccgtaaagcctcctaaaatgcgcattgcgataaacatatgcaaattgatcgccgcggcggtaccggccgagcatgcacaaagcacaaggatagctgcgttataggcattgcgacgcccgaataggttcgtgatagggccccaaataaaagatgaaaatcccatagcaattagcacacctgcgttggtaacattgagaatctccgatgtagtagaaaactcggtagcgatctccggggttgcgggcaataatgaagtactagagaatgtgacagcgagggtcatccagctgacgacgaagaggatgaggcatttgcgccatgttgggatgccataggcgtttgaaggctggggtttcagggccaggtcatcttctgattccgtgtcatggggagaatcgacctgtggggttggtttttgggactcgagatctggtttggattccatggtttggtgggattagacggtatataatcgatgtaaaagattgattgataatttgcgcatgtctaagttagtgaaatgatgtacgcagataataatgcgacaggattcagtcgacattttgtacgaaagacctctcggcatgttgaagatatcgccgaagccttttctccctggagtatttttttctccgaggtggatctgacaggactatcggcgtaagtggccgacagttccattcggaagatgcgagtcacttcaaccgcagtcagggagtaacagccttagagaatcccaaagtgaccggaagttgaagttcgtccatggatgtttctggtggacacctgaaatatcaggcctttattttcataactcggacattttgacaaatttgacgacatacagattcaagatagtccgtcaagtgcaaactctcgtttattctaggcgtaggagatgttacgaatgagctttatatgctcttacattttatgatccataccacgtacgcaccaaacaccccacaactgacccaaggccaagctgacgtgtcccccaagctttcccctactcgtacagtgggacctcggaaatattaagctacacctttgtaccaagttataccgccctccaaattctgtcagttctgccagttaagatgtgtacacgtgatttagtatgaagaggataataacactacttagacagtccacgggtcaaaaggtatattacctaaggagactgtcaaaaaggacgaaaagacacatgagaagactacctgagaagatcacnnnnnnnnnnnnnnnnnnnnnnnnnnnnnnnnnnnnnnnnnnnnnnnnnnnnnnnnnnnnnnnnnnnnnnnnnnnnnnnnnnnnnnnnnnnnnnnnnnnntactgggcaggcggtatacaagggcggtataacttggtacaaaggcttagcttaatatttccgaggtcccactgtacaaagagctcggcaaaagagcttggcgaaattagagctttggatctagcccgccaagatatcttgtgtcccaaggcgagctgaaaaaaaaggggagacctcaacgcaagggataacaaaagacacctcggctcccaggggggggttcttgatcactacctaggtacactggatccgacgaggcaatataagaagccagctatggaccacaaagaagcacaggatgtcgaaacgacccgttctttttcaactccaatggaaaagcagcatacagatcaccttgtcctggtcccccaacctagtgctcacccccgggaccctctggtacgacagaagaccctcgaacatcattggccccggaaaacaactgattaaaccctcccagaactggcctgttactcgcaaatatgtaatactggctgtgctatgccttgcatccttctctggtgctatcgcgcccttatcaggacagctcaatctggccgatcaggagaaactgtacaacaagacgaagctggaggagtcctatgcggtatgtttacaactccctttaacagagagtttacactccgcatcaccaaatccaatatcagtccatctaatatcccccagaattcagccgccctagccggcatggcggcgggcccatttttcttcgccccgatatctcacatgcttggtcgcagctccgtgatcttctggtgtgtgctattcacactagtatgccagatatgggccgctctcatgaccgatcctggtaactatatcgcatacgtgatctcccggctctttgccggcttcttcggtgccgtgcctacagtgcttggccctcgcatcgtgactgatttattcttcctgcaccaacgcggtcgcgctttcactgctctgcatatggcgttcttgtttggaacgattgccggtccgacgttctccggttttgtttctgcgcactctttctttcctgttgagttctggtggacggtcggtctgctagggttgacgcttatctgttgtttctgtttcctcgaggaaactggattcgaccgtgaatgccttgaaaggaaccccaatgttccgggtggaattttggccaatagatttgccactttcttcttcggggagagggttgtcttgtcgaccacctggaaagaaacggtatgtacagaaaatagaaaacctgaggctctgtgccgtcccataggacctgtatccgatctaacgtcaatcgaacaggccaaagtcggaatcacccctttcctaattggaatgtgccctgtgacaatcatcatgggaatattcacactaatctcctttggattttacgtgggtgtcaatgcactcacgccagtatggctccaaaaacccatttcggaaggtggctacgggttttccctggaacaaaacgcggcattcacgttctgccattggattggcatcattgtcgtccaattctacggccactatctgaatgatcggctgccgctcgcactggcacgacggtacaacggcggtgtgtggaagcccgaatatcgactacatgtcctgtggattcctagtcttgtgatcaaccctatcggcctggggatctttggtgccgctttgcagtatcatttgcactatatggtactcgcgctcgcagtctttattgtgactgtcgggtcgctggccagtgttccggtcacggtgaattatgtagtcgagtgctttacacggtatccggctgaggcaggtattgttattggtgcttatcgtattgtgtatggattgacaatcagcttctatatcaatccttgggttgaggctgttgatgttggctgggtttatggtatgatggctttctttgcggtgttctccttcatgttcgttatgttgctcatgtggaagggacatgctattcgcaacattcaatttgcaagtcttggatctagcgaggagggggaacagttggtaggtaaatagttggactaccaaataggctggagtctcggcaaggggtcattgtgcttcagttggtgggacgattaatcaacattttatgcataaaatcgacttgtaaagatgctgctacaatcgaagccgttgtagaaagagcatggatgaacattgggctatcgagagaggactatatatggccgggggagaggatatgggagtaaacgagcagacctttgagcgacgcctccaacataagtcgtctcggcgagaagctgagatcgtttgctcaaacacgtgcaatttctgtctctctcacctcctcttttttgcttcctctttcatcccttctatccactacatcgagacagcgtggcgacacactactcaacatggaagccattaaagatgcctttgcaaactgcaaggcccaagaccgcgctgccctgataactgcgggcgcggctagttttccgaagattcggagtcagcatccgatccctggtcttcgagacctaagaaatctgactccgtctccgattcgtcctcctcatcggtctgatcacgacccgcctgagccagaaactgctgctcagcatcgctaatccatcgaggtgcagaatggggctcgtctccgatactgggacgcgggcggagagcagaaggggggaacagtgctcatggggacggcatttttgttatagcaggcaagcagatactagattgtcaggcttcacatgtttattagcgagtacattatccagtctcacacagatagagaatccaaccttctctctctccccctagcctctaccagatcagtgtcggtggcggagtggggggtgtatttttataatatgaccattggtggggagggagagttggccctcaattgtatataaaccaatccggccacttgtacatagcctaaaactctcatgatgatcattatcacaaacacgcatccgtagatgtatccccaatgtagtgatgtaagctcatcaacgtaggagaaaacatgatgaggagtcgtaacctgtcaaggaagaatccatccacggatggattgagcaggtcattcataagctctccagcgctggctaggtacttcacatgaattcaaaaacattgaacactctaatcaccatcttgtattaaagagctttctatatacttctgcacagcaaaacagtgaaggtcagtaaagagttgtagagttggatagtgtattctttcatctcccaagtataacctcatcttgcataaccaagctcaaatagtgcattgttcgactctttgcatgctcttttgagaatgctgcacatatcattgacgcctctggatggacattcatccggtttccatcgcctgacgtgttgccggctttatcatggacggccttcgaaaattgtaggacccatcccattccaagctctcaaacaaattaattcggcatcccgccttaatttcgaccagctggacacataatgtaacattctttgatagatgcgggacagaggtactccctggggctaccgaaaccattgtaaatttctataagagtcctatcgacagaggagtaaggaaaagtagaaagagaggaacagaaagctaaacatatccctggctattagaaattccaaaatttatttacaatgtccttggctgcagatagaccggggaagacgtttgcctcagtcttcataccgaccagtgtcaatgttagcctcgatcggcttcacgaattctgtgcggaaagcaattttgtggccaaaatatagtaccgcaaacaatatgagactgagatagttgatgaaaaagtccgtgacgctgaatgtcggaatgaaagcagtaaagccttgggtgataatgataaggacgttgaagaacaagccataccaagaaaagaatggctgccaggtagccttgtaaggaaggctgtcgcgcggtatgcctcgcgctttcagcgctctcataaatgccaggtgaataacgtttagagatgcccaggtgataaagccagccaatccagcaatttgcatcaaccagttgaaaacggtagcacccgtgtttgacaagttaaggaagcccaatagaccgaaaagagctgtgaagccaacgctaccatagggtacaccgtgcttagttgttttggcaaaaaagggaggagcaaaaccctcgttagccagcccgacgagaattcggctgccactataaacattggaattggcagcggaaagcacgacggtaagcagaaccgcatttataatactcggtaaagcattaacaccagctcgtcgtgcggcgatgacgaaaggagacgagtttgcatctgcaccgttgctttctccaagattctcgtcatcagaagggacgacaattccgataaagaagaccgtgaatataaagaagaacacaattcggaagaaggtcttacggatcgcggaaggcacattcttcttcgggttggcggtttcacccgcggcgataccaacaagctcggtgccttggtatgaaaatccggcttttatgagaatagcccagaatccaatgaacttagccagagcgtcttggccctcgatcaaataaggaacgaagggaccggggtgagaccagtatctaaaccctagataaccttcctggcccactccggcattcatgcagatggcgaatatcatgaatccgacgacggtgataagtttgatactcgaaagccaaaactcaatctcaccgtaacaattgacgggaaacatattcataataataataacaacccagaaaaccgcgataaaaacagccatcggaactgtatcatcccagaactgaattatgaggcccgtagccgttaattcaagggcaaatgtcgaagcccacgaaaaccagtaaatccagcccattgcaaaccccagactgggatcaataatgcgatttgcgtatgctgcaaaggctcctgggataggcaggtaggtagcgacctcacctagagccgtcatcaccgagtaaacaattgatccgacaaaggtgtaagcaagtagcgcacccactggaccagcagtggcaattgcagtcccggtaccgatgaaaagacctgttccgatagcaccacctgtataaatatgtgtgagaattaactctaagaaaagaacatgtattgggggtgctcacccatcgcgatcatctgcagatgtcgacttttgagcctccgctgcaactccggtagttgatgagattctccatggctgtgtttttcttcggtatcaagatcccgatgtgcgaagtcttccggatttgatacgctgatatccttcttttctgttccagaagcgttatatatatcggggacctcgtcggtggtcatttctgggtagttcggaagggtcgtgaggctgaggagcgatggaagttggaattgggtcaatatcccgtctattccaggagaattgacacatttgtagttctcaatcgggttgaacttcccaaaacgatttctccacggggaagatcaggctggtcaggctggggaccccgcgtttggccgggccggggacacttttcgggttccaccacgaggccgaacgagcgaatgtaagcgactgattttgcgggtctgttcaaggaattgataagctgttggaattcgattaggtgtaatcggaggatctaaagcttcctttgcttcttgggtggccacaagcaaacgcaccccactaattaagctaattgtcgcctcgcctataacgtaaattcccgattgagaacataaaccggcccggtgcgtccatcccgcattttctattaccccatgtttaccttaagccgataacaaaatgtataggaaaccgcacctgcattatcaccctgatcaagcggggatcagccgaatcctgtttccgtgatacgcttccaggtttgtgtatcccacgttctgcagacccaagctgtcgaatcatatccaaaatgctcccccgatagtaaggcaaatttagaaagctcatgagagcatagccttcccctcccgaatcatgctttggagatgaaggggtataaataacagctgggggcacctggtcgtgtcgtgcaatcacacatctgtagtggtgctcattcagatcttaccagttgattgtaaaattcgagatgatgtgtctgatgtgtctgatgtgtctgatgggctataccaggtatatcatttcagcgggttttgtccacaaatctgattgcgctcgacatacgttaatggcgttttgctccggaactacgaattttcactggatgttctcatgatgatggtgaattggtcataataatactagtggctgtggctattcgtggagacgtatcgtagttaacatatagcaagtactaacagcaaaagagtggtcaggttacgtctccacaatccaaagtgtgaccgacaataaagctagcgataatgtgataacgtcagaagggtcaaggtcaccagggaacatctactcgagccagattatcatcgctagtgatgcagaaagcgctccacatcctgcatgagtgactgcaacagtctgtgagacgtctccgggttctggcagacagttctttggcgaatctggcttcgagataggcccttgaatcacgtctgctgttctccatcctagaggtaccgaatccggtgcattcgacagtgattttcgggtccaagtcgcgataatgtgctgccactcgggcatagagggcctccaaacgtctaaattgcggaagtcagggtctctaaagaccaacaaagcactgttgacggatccgaatttcaggacccattctagagaatcggatgtataaatgcccggccccaactcgttgtccaagtttctattgtgaatgaccggggtgaaaaaggccatcatcgcagctaaggcggcccgagtagacactcggtacaagaatgagccgccgccgagtttgctgacgtagtctttgctgatcttcgcggatagacggtccttgttcttatcccctttaactcgaactgtggcaatatcctgcggcagacgttgaggtctgttggcgggaaacagctcctccagtctatgacaagtgtattggaatccaacttggggtgggatgggatcaaggcgggctggcataacaacgactggctgctgattgtgtccaaaaaagtaccgatcgtacatcgatgctggaagtttttcctcttcgaacagatgctccaagatccatggcacaccgacatttgtcgggatgagtcgcacctcatcttggagggcaatcgctgggtcgtaaattgcatcgaccagctcatcaaggcctgcgagccaaaaaatgctgcttaatgggccaatcagttcatcaaatcctaaagtcaagatcagtaaaaatatcctctaactttcgccaaaaatagatataggtctgggtacgtacgatggctgttgctgtcaatgtactccgcgatgtcctcggggatcgtccccgggtatccatgctctcttgaccataccgggcgaaatcctgcttccgctaactgactcatcgtacgagcgagttgattgcgatttccctctatatcagaggccatatcagatgattttcctagcttctcttcacggataataggaattgtgaaagtgggtgttccaggcactttgctggctgatgaggaagacgaatgtgagtatgcgagggatgggatggacgaaatcgaaggtatagagtcagtcggacttgttgacgtggttgggctgcttcccgcaaccagaagcggaaacggaaagctttgtcttggatccatgacttgatcaaatatcgaagtaaattagatcgcaaggagttgagttggattacccaaatcccgttctaatattcacgggtatatgtatagcttcgctcttgccaaaagtaatggcacctgccagtatacctacatcttggcgttgagtacaaatataagagcaaggctaggaaactacgtatgtagtgttttcatgccaaaaaaggagtcggatcttaacaccttaacatggcaacatggcaccatggtaccatggattccccggcttacacccaatgttggcaggaaaactgagttaacgtttggcttctttgtgcagccagtctacatatgtgaaaatgggcggggctggcgtggatgaacgacgctttcgaacactatcggaattcagtcaaattagcaaaaaccaaaaacaaaaacatacaacagtgaggattcgctggtggtcacccacccaactactaactcaccggcgtgtggcttaagtacggctgagcggacgggaagccctgttttccacaccccatggtcgtatgtggtagattatgtgtcggaaagacttatggagtcataatcagtaagtagttggttaagtggaagagcctgcagatccagttgggactgcgcttagttagttgaatggaatttccctctacttctatgcgaagcgtcgaagatgatacggttaaccatcttgagtttccaaaacaaatacgtcaaatatccagctcattgtgtctgagcctagactaaaagagatatttggcggtcgttgcacacaaagagatccaccaatcatcccttcataaagaccagttagttgtatattctacctggcccattttctttgtcggtggtctccgatcttttgatagagtgttgaaagtatttttcactgtcgtattggaccatgaccttctctcacccgtcgactccgtatccattatagctttcggtagatagatttaaaaaggtgtaaagtgttttaagctcagtgtggttgtaggactgaccttggaagtaaacatagaaagacacagacgaaacgtcgcacgaagttgatcgcagccccggagtgaaacgagagtcacgtgacacgactgtgctggtgtcgaagacaagtgtttccggtcagggcaacaatactttccaggtcaagaatctccctattaaatatagcataatccatatatcagctggtccgtaaggaaagtgtattgcagatactgaaatactaaaataaaaaataaaaaaataatcgtcagctgcagggttcgaacctacgcgggcgaacccattagattatgagacattgaggatatagtccaggtagttcaagtctaacgccttaaccactcggccaaactgactgattggatgattttcacaacgctaccagacatcatattgtttcaaatcacgaagcacagactccacacacagtgaacggaagtctcggggaaaagtaaaagaacaacgaggtttgataagtagtataactttaaaaaaaacagatctacaagctagttcattgcaatccgatagccaaaaaagaaaagggtaaattgagaattatatgtttaggcagagtctcagatattgaatgaagatctatcttactctgacatctcgatacaccagtctcccctgcttctggcgaaagttactgtgagatatgacctggttgccttacccacagcacccataagtgctttcgactgtatggacaatctgatctacgaacagtaagttgaaaaatccattgagctacgtagacgcaatcccaactggatctgcaggctcttccacttaaccaactacttactgattatgactccataagtctttccgacacataatctactacatacgaccatagggtgtggaaaacagggcttcccgtccgctcagccgtacttaagccacacgccggtgagttagtagttgggtgggtgaccaccagcgaatcctcactgttgtatgtttttgttcccgtgtttttatgtatttttgctagctatatataggagacgggaccaggaaactaagcctattcttaattcaatgctcaaatttatagtagctccttagcaatatccttaatactttctttgtaaggcgatcttgcttgaaatatatagagagagtaagatatagtgccctatcgctcggacaatggcttttttattgatattgattcacttcttgaaaatgtaaaatagtaaatgtcgaccagaatgactccctcatccatttctcacccaggcgacacccacccgactaatgaccgtacttaagccacacgccgtgagttagtagttgggtgcgtgttacaacctgcccctggactggcgagttacacactaggccaaaagaccactatatctgagcgttacgctcagatattccaggctccggtatatatagtgcgtgtcgtgacagtgcgtgaccaccagcgaatcctcatcgttacatgtccgcattcaccttttttttattcgtttggaactccctcttgctgccctactcttcagcccccacatcccaatatattagattatcgtcagattggtcccctctggtatcaaagcggattctttcccggcgtgcacccgacaccgacaacaccgcgtaggcggtgggttgaccgcgatcctgaatgtcaaacattgcaaacatcccagacgctcttatcctcagtctcaaagggaggccacgcccctttctttgtacacacccaaataagatatctctagatctctcagctgctttcaacgactcgtgacgttgatttcttctcgtggattgtatcccggagagacgtcttgccgagtttaccgaaatgggaatcagggggttgtggaacttacgtgtggacggttggtaaaatgcatgataatttgtcttaaaatattaatcgtttgaattaggccgctggtaccgcctccgtcatccacggattcgagtgagcccaccagaagcagctgagacagttcgcagagtcaagcagatatataacaagaccatcaaccttgaacagtgggatcaagttccttttccaagcccgctagattcatacttcgattttgtctacacgatcgatcaggatgcgggcaccttcactctttcaaagcggtcggctgttgacggcgttccgacgccccaagcatttgaagccagcctggccgagatatgtgaagcctcgagcatttccgttgagtctttgcgacaaacacattgtccccctattccagtttctgaaaaagatcacgactcgcaatttgactcagtaagcctagaactatggaatctcccgatggagttgcctacagctatgatcgagcttcaacaacaattcttcttagactttatctttcaatggcgctcctggattgacgaccccatcacgtggcactatggaagccgtgtattcaatgcatttaatagagctatcctccgcctcgcttcatgggattttgaggtgtcttacgattgcgatgtggcactgcccatcaaccatagttcgattcctagctggcaatttcccgaagaggaacggtattggtttcacgggtttctcattatgctgcaaccggaccttgagtcacctcaactgcttcgcacagccatcgccggagccaaagcgttcatcgatagttctagtcgcatacctcagaaagttcagtctatccttatctcaccgtaccatgtggcttttgtcgaactgtcccaacacaacattgcgtgcagcgaggttctcccgctcctaaccgattcctcggcaacgcaatgctccccgggctttcggatattagcccaggttctatcctctaattgctggaaaacgacctgggctaacagagagaagtggccgttttctatgccatcagaggttttattagggatcctccatagctcagagccaagagatgcactatcgtttgcacaagcttccttcgaagctgaacgatggtattatgcttcagtgccccagtttagggatgtttctgtgcaaagcctggacctgtctataccctgctgcggtgatcgtaccggattagaggatacaggcgtacactgtagtaggtgtggtatatggcaacatcaaatgtgtattgggctggaaatcttaccatctaacgattcattcacctgtgccgcctgtctcgaggaggacccgaaagccactcgcctcacagccggtgggattaacagactcggtggccgggctgaaagaagaacgtgcgctatcaaaatcgatggatccgccaaaagccttcgagtgcgactatcccagcctgcacaccttcgaccagagctacggcttattggggatctaatccataatatcccaaagggcctgattgattttaccattcggttcaatggggtctttgcaggattggcatatggcgtggatgctatggcacctgaaggaaactgttgatagtggtgaagtgatgattttccccctaaatgaagggacaccaaagttatgttgagcacttagcagcagatgttaaacctgtcttctatctttctacttcggagcctgggtgattgaggtctgctctaagctgagccattcgatagatatgaggggggcggaatgggtcgaaacttccaatgggatcaaacttgatgtgggaaatggttgaggtggaagaagagaggtgaagtaagacggttgctgacaaaagtacaactccacatagtgtggatatgaaacagatgttgggtatcgtgcgtacatatgtaatccagcggctaatgctgactctgaacccacgggtgtattttcggtgactgaaattttagagtaatggggacgctgaaaatggctttcatctaaggtacctttaagggaggtacctgtgaatccatctattcagcccttcactttcgacagaatgcattatcctcaacaaaagcggaggaagaagaatgtcacttacagatttctaaatagaagggggaaagtaccttttggtatacgggttgaatgtttaggtgaagaatatttaggtgggtgaatagccgcccgaagtgccctaaggagggctgaatagagtagcgaggcgcccacgcccgaactatgggcagtacgcgaccaccaccttgacatgctgttgtatgtttttgtttttgatttttgattttctacctaggtagaaatatcaacaacatgttggtcagcaacaacgtcttgtttggtattttcgatacaaaggtgcaataagcctaacgcgctatagctgttgaatttccgcttacttgcgttattttagcctcaaacagcatgagatcccgcgagataattagcaaactgctaaagaaccaatgaattctctaccgatgcgcacaaaagcactgtaccgttcgataacccctacgcatgctctggtctacaatacatggatatctcaacgaagctcactctggagagtgaaatggggagaacacgtcgcgatagcatgatctcccactatcaaaaaccggatcgagcctatcaatccacggatgaggggctattcacacgtatggttctcgtgattcagcaatatgcttgggccaaataggatctcctagttttcaaggaaaaggaatactacaacaaattatgccgatgttcaaccaagagggagaaatttgtgcataccacgttgagatcgtgttcgacgattttaggactatagtatctggaacctcctcactcgctacaatctctaagggttagtccagaaggccagggctcggatacttcatttggggttagcaacatggacctacctatatttggtttatatataatccgatgcaatgaaagtagaggctacaaatccatacgagaaaggacgagattttatatccaagttggttacaaaatacgtgtgtcaccagctaggtagtctcatagtatcatagagcctgtaaccatagtacgtacatacatcctattgagccggggttatattcgctaagatggcattcgtgggcaagtatgctatgaagaaagtgaacggcagcctctgcccacccggggaacccaagaagagcacaaagcagaaggtgactacatattcggctcgatcttcgataagcgataccgttattcttccagaccccttccctacctcaactcaccttaattacctgaaaaggcatggataaggccaatccggcgcaggtcgctatctcctggccattttatctgcagaaaatctttagttttgcaacttcagttcgttggaaactcctttttgccctacttttcagtcccctcaacccatccacctgaatgccctgaacaccactatcctatacctgaatatgctgcccccctgttcgctcttatccctgagttcattatggttgaggattgggccttacgaactccaccttcgagaaggatgctttgattgcgtgggggctaaatatcctttttctgtttctgcctcgcatgcaagtttggcccccacgacaaagttcgctactccgccaaggggcgaaaacctcgtgtctttgtttttcatctctgccagatcaagcgaatggagaagagaatggacaagcgaatggacaagctcatgccaagccttctcacagatatgcttaatacgaggggaacagtggacgagtgggatttcagcctagcgctaatgtcgatcctaccaagatttgatcgtcaatataattgattgatccgaatgtcgatctttgttgtcaacgtggcgcagtgaatgataggtgggcaagagatatacccaacaaggacgtcctatatagatgaccctagggcctgttcgtcttatttatagcttctccttctttctcttctttctcttgtctactctcttcagtcaaggtagagcgaaagaagcggtattcccccggagctgacttccacaatgaccaaccccctctctgccgctacctgcgccatctacgcagtcctcgccatcccagtactctacctcctcgttcgacacggtcgctacggccttctaggatggctcttcctgttcttcttttgcattctccgcattatcggtggcgcgctggcagtcaatgacaccagcgccgccgctaatattatctccagcgtcggtctttctcctctcctcctcgcagcagctggcatcctacacgaggcgtaagtattcagcccatagacactgaatctatgctaaatccagcagtcgccactatcgtatccagtccctcgacaagaaaatggaatgggtctccgtccttgcctaccacatgcttgtcatcgcaggcgtggccctaacagctgccggctcttcaaaactccaggagcacgaggaacccctcaaggcagagaagatttccagggctggtatctctattatggtggttgcgtggggttttttggttggctggactgggttctcgtttgttggtccccggggacggaattcctcgctcacgagggcagggaacatcgtaagcacttaagccccgtgcgcatcaaaatgctgtgctaatgtttcgtacacagcttcttgtggccgtggccttctcgctcgtcttcatcggcatccgagtcttctacagtcttgctgcgctgtgcacgcagagggcgtcgcttaatcccgtcacaggcttgctggttatccgtgtggtgctaggatttctgcctgagataattgcggcgcttgtgtgtatatttgtgggaatcaagacgcagggtgcggcgcagttggcttatgccgaggaggagaaggtagttacgtagtttcggttccgccgaaaccacctcaaccttggatttagcttgctcaggatgcgtgttgtcctccgctatacaccttgatgataagagtttacaatggtccgagtaattataaccgaccgtgtggacctcttatagagggatgccttagtaacttcgcactcaacgccttttccctataattgcttgggtgggatcagagcaggttactgttatgtcacagactaaacaaacaggctttgattatgagcccccaaagccctcatagcttgcgatcgagagtgtgaatgctgtgaagactgttgagcacggtggataagtaataggttatgaagccgctgaccacgggaaatttaagatactcaaggatgtccgcaatgaaatgtcagtacaagggctcgtaaaattggagatacttggccatcgcttcgtagtagctaatgagaagaggaagcgagagatagcgcagctgaaacgctagacaatcctggactgagccttaacatcttatcgccagctgtaaagggtgattattatgatgaatgggctgaagatagggctaaggatagacatgaagaataaaaaaaacaagaacaaagcaaaaaacatacaacagtgaggattcgctggtggtcacccacccaactactaactcaccggcgtgtggcttaagtacggctgagcggacgggaagccctgttttccacaccctatggtcgtatgtgccatattctgtgtagaagaggtctatatcatacaggtcatttacaacaagtgatgagtttaacgtcagaaatgtgagtgcgtgattgatagaactggtgaaaaatgggtgagtgtcgtcgaccgggggtgacaaaggtgagtgcgctataaacgggtggagaaccagggtgagaatcacccaagtcacgcgaccactgttagggtccgaaccaggatcacacctttagcctggggagtccaagcaaacgaatttagggaacgagatacggtcatcgactaaattgagccttggtgggcttgaaggtcattacgacttctggtattggcgtgatcttaggttcgtgaggaatagggacgataaccatggcccagaatacaaaggatactggtcatggtttgaccgtgagggccatcttgttgatgatgacactatgaattgtttcctttcttgaagcccagagcagagtacatacacagcaatgtagaagcctatactataggctcatgaacgccgccattctttttattactcaatgttaagatataagcctataattaacctataaaagtcggctgacctataaccatgggatgataggtgaatttcaacatagaatattggcagtgctattatctaggcgaaggggcagagagaagttggtgcagagcacaccgatgggatgctacgggtagggccagtctagacagtagtatattacgaggtgcttagatctaactggcagatcatccttacaaggtaagcgatgccactcactattctttttctttttttcttgcctccccttgcatctgctgatcacatgacgtggagggggttgataaatatataaggcgcgtcattccccgaccttcttctctcaatatgcaagtccacaacatgccttcccttctccaaaaccagaatctatcaaatgtaggcaaagtggtgtcacactttaagagaagccttgattaagctcatcctagatcatctacttggatcatcatacaatttattcaaccaatgtgcaacttttagatgaacggcgtacagtttatcgcttcgcacttgacctaggctcatatcgacactcgattccccaaaactgtcacatcagtcattgtcaaacagcaaaagcataactgggaggaagaatttcggaatgagatagcagtctacgacaaattgaaggagctccaaggaaaagtgattccctacttctttgggcaaggttactatgatggattcccagcaattgtattgtccgagattgatggcgttactctctatgaactggcccgcagtgagaaagacttccctagagaagttttgaggactcatctcgaggatatctttcgtcagttttcggagcatggggctttatatcgagatcagagattggacaattttctactctgcgatcagggcaaccaacgatatagagtgatggttgttgatctcgaacaagtcgatttccctgatcgccttcacccctgggaaagaatgattaactcggacggtccaaagtttataatacgagatttcaaagatatacagtatccgcgtcgtgaaccgtctcctgtacgaatatggcggttaccgggtggctcgagatcaactttgactgaatcggaagtttgcccacactaaggactggttattctgtgcccacccgctcgctgacatcgaagatatgagggattgcatagattggggagggtggcggcgttggtgttaacgcttttggtacgtttagaatcgttcgacttcttacgtttactaatgaaggtcctttaaagtctcagtaaagaggttaagacgacgcgaaaatgcctagaaagaagggtacagagctctctaagcctatgacatggtccgaggctttcaggagctatgtgggttcatatgctcctgtctagtggattcttcaactccttcagtttcgcttgcacgcagctacggcaatgcgtggttgctcaattacattcagcttatatcttccctccttgattgtaagtgagaaatctaaaaatgtaggactagaatttcagtcgatcctctcttgtggcaaaaacctcagtgtatgattgcatccagataatgtggtataagataccacgtccgactgtctggtcccacttgctgaaagtatgtatgctgtaagttgtcagcatgaggctagggaatattgtataggagtctaacctcgaatactaaagcttacctatttttaccggcaatcccatccctcctagatatattttaccctgcggtctaactagtcgcagggtttctccaaaccaggtaaaaattaagactacaataagccggtatcgtactagtaattacgtcctgaattctagaagataccagatcgagaactctgcgaggtttaccctgcgaccctgcaagcgcgacggccctctagagaatgaggcctttagggggaaggaagagaacccgtgatacgaataccagaagcaagatgtaaatatagctaaatatgcatatgaaccttcagcataatacaaatgaactgaactcatctcatccaccttctttcttttgtcattcatcttcttattcttatcctcaaccatcttcacattctttcatcttctagcattagcacttatcttttcccatcctcagtcttcgtctttgtattctatcattctcttgaacacagaacatgatacatacgaccatagggtgtggaaaacagggcttcccgtccgctcagccgtacttaagccacacgccggtgagttagtagttgggtgggtgaccaccagcgaatcctcactgttgtatgtttttgttttgtttttagttttttgcatctctcagcagcactctgcggtggatgccggtgatatacatacatgtgtgagaagtccggatacatgactgactgccataagctagatcataatttcggcggaacattttacagctgtacattgttgacatcacgtggtatctgaatgatctgcagttatgcttaggtagtagatataggtaggagatgttgctgtttggtgttgacggtacaagagcaatcgcccctggcttgtctcgcttttgttttttgacaattgatactaacgacctgaatattacaaaacggtagcccgaaaacctccggttagacgcagcaggaatcagggaagacctgagtaaaatttggaagcaggtaatgttctctatattcgtagtctgtcaaagactttgaagcaattttcgaagatatcactgggaggtgtcatatatggcaagaggggagatacccacgagataattagcccgagacatatcagacgtgtcacatagaagatgtcactacggagtatatctgtctgccttttccctcgggtgaacaaacatttagccgcagactacccgaggaacggcgtaaagtccgcaaaacacccgcgcataaccggctggtcactacggagtaatgtccgtcggctactggctgttacgaagtatttggccgtacgtcgaaaagacccgagtgaagaataccaaaaacagccataaaggcggataaattgacctaaaagaattgcagttttgaagacaagtgcaacgcctaggttatcgtaacgcatctccaaaagcatacttcaacctccaaaaggccggaaaacgagaccatgaaaagataaagaaccgacacgggcagaaataaatccaagaaaagctcgggcacgctgccaggtttccgtgccatcaagaaaatcgctcgaaacaaattggccaaagaccaatggagagagaaaaaaaaggaaacccatttgacggtaaacgaataatcaccctggtttcacggcccaccttggctggaaaccacgaggaacgccttgcacgcattgagcataacccaaacaaaagaaaaacatgtagcaagtaaacaacagcaagaacaaaacaaaaggcaaatacgaggtcgcgcgcactgggtataggtgataatcaatcttcgtgatcccgttttcaattcccggtctggacctggagatggtgtggcctcagaccagggaggaaatgtttggatttggagttcaattcgcctgcgttcggcactgggattttccgcaggcttgaatgtcccatttttttttgagtcgccggcagtcatagataggaaaggaaaaaggtgagagatgatcgtacagtacgtgagccgtaacggacgagggatgtcgtaaagagtaataatacaatggagcaaggcggttggtgccactgtttggatgggcgccggctaaagagttgggagagggataatggttctccgggaactttagcggctgaattgggaccagaccgtactcagccaaccggcgggaataccaatctcagaaggcgcaagcatggataactggccccaatcacacccatccaggaaggcgaggacgtcgtctccgccgagactcgttgatagcaagcttgagtctgggtattcggttgaggtcagaggcggggagggagccaactgagttacggatccgggtggcgggaggacagggatggtgtgtgaggcggctgcgttgataggagggagggattgggagtacggagggggaggcgcctgcgggcgggctggaagccaggagttgatgggatttaggcggtttgttgttgccgtcatgtactgggagggggactgcgtagttgcggatagagaggggaagctgggggatgaggtggtgtaaatggggccgtctgggtggtgttgctgaagggacgggagggagtacggagatccggatggcatttggcggctgttgggaagtggtagactgggacggcggtcaccttcgtgtccaggtagcgacagaccggggctgttgaccgggacccatgactcgcggcgaccaccgacaccgtcgagcatctggtcaccgggatcgccggtttcactcctgacggcgttgcttccagcgtcactcatgttcgtgcgctcgtacatggactcgcttgctgcgggaactgcgataccgtcgtcgtccatcccagaatctgttaactggtcctcgatgcttccaaagtcaaggaaaagtttttcgagcatcttgaattcctcgaggccgccaccagcaccgccttcgcggaggaggcgaatcccgttgaggccgtggtcagaggcatccgacatgctatccaagcggttccgtgaaacccggcggaaatcgcgcttgactttggagaagtagctgtgaaggcggttcagggtgcggaaccagcccatggccatcttcagacgaggcctcatctctcggatgatatccaaggccttgcgtgcttgtgcgacaccaagctggtggctatcgtggctcgcagggggtggcttagtccccatcaatccatccggatccatgtgtgggaaatgcgttccataaacaccgacaaaagcggcattgtagatagcaaatccgaccaaggggttctcaacaagagcaccgcgggcttgacaagtggccacgaggtcgatcatctgccgcgctgccttgaacagctcacgggcactatcccgccagaaaccatcgggtgggccattgaccttatcgacagggaacaacggctcatccaagggacccgaaggctcattgcagcggagaggcaggaatgggatataggcacggtgaaggacaatcaccgataggaagtagacaacatgcatcacggtatacgaagccagagtggtcttgtacatgatatgtgtgtcggtatttcgcagggaatattgcaggttgcgggaaagactatcctggaactcgttcaactgctggcggagcgaggcgaagcgagattcaggatgccaggggggatactgctccgtgcgtcgaccgccagcgcaagaccatttggcgatgcttccccaaacacgaatgatccgaataacccggctgagcaccgactcctctgcgccaacctcccatcgatcaacgtcctcttcgctggagtccttgcgacgagagataggtgaccagggcttgttatcaggagttccattgggtcctgggagtttttcatcgccaaagcctcctatactttgacggatgctggggatttgcatgctttgggagccgaaactctgcggacgccgaacggccggttcattaagccgggccgttcgaacccgctcgccgaaagcaaaagcgttgtcgctcggaagctgaattccgagttcctttactcggaccatccgaggccgatactttccactgctgaggcatcggtcgaggatgaaacaagcccagaacgtccggcgcttagtctcttgcgcaatgatatcatcagaggtcggctccctgggctctacacgtcgtggcagaccaaaatgatctgcctcggttctcaatccaggagacgaccgcgaaggatctcgcgctgggaattcattttcaagttcaaagggtagacccatggcctgtgcaagccggatggccatgcccacatagacccaagcacttttgcctcggcacatcccccactcgtgcaaggctaacatcaatagcgcctgtacgcgcgtaaggtccggctgagcgaggcaagcgccatccaagccggccagccggctgcgaagggctgcggcatagtattccgatgcggcaagcggattcgaggaatgactaggcgatgctggtgaatgagctgcggccaacggagggtgaaaccgagcagtcagggccagtacgcccagcgggatgagtgaggaggatgggtccattttataaccgggattccggggatcttgtccatcaaaggtcgcgggaggaggagaggaaagctgtcgaatctggccgagaaaggtcgcgggatgtaggaagggtagaagagtggcaaaatgcgattggaagagatcgaagacggcctcccaaacttttgttgtaagtattgaggaatcaagcgcatccacaccgagcttagaaccagccgacgagccagagatgcctaccaccttgcgtgaacgatgtcgtttcgggccatcccagtctccatttcgatcctcgccttctgccagggcagccagatctcgtttggcgctgctcactccgattgctggggttgggtagacacattcgcgcccggatgattcgcacgcgcggcaggttgtatcgatgccggcattgacacacttgattttactgcgccggcatcgagcgcaagcgatgctggaccgcatgttgtattggacagacccgaagtctgcaaatatgcgagtcgatttgtgtcaagcgcaattctcccatttaccgtatccgggtcacacgttggggggttttttttgcgggaagaatctcggtaaattatgtggacgttttctataataatcagcattacatatgcggggatgtagcttgggaaacctaccagagaaccctggcgaagagaaaaagagaaagagggaaggcccaagggagaagaagaagaacggaattggcggagtgtgggggaaactcaaaagagtcggggcaccggaccgggagaaacacaagtcgggagggaacggggaattgtctccggggaaatagggcctgagaagagggaaaaagtgaaagggaaagggtaaaaaaagcgaaaagaaaaagaaaaagaaaagccgagaaaatcaagagccgctgaaattgcggaggatcccaaaagtatgcaaggacgcgccttttcgtggaggtggagccccccagtttctggcttgccgattgactgggattgttctttagtatgtactcttactatctacaatatacaataactatatagttagtagagtaaatatttttatatatacatatattcatatattcactctataatattcaaatacaatacatatctacctccatctccatacgtaatatataccttcaacttctcggcacggaaaacatcctgcggcctgtgcggcctacataggaaatataccccattcttaccagcgctctctgatctcatgatcgtcatcgcatctcaacccgactcgggttcaggctcacggtccgaaaaataagaaaagcaaaaagcaaaaaagcaaaagtgcaatctggcctgtcaagtaggacattgtcttgactaccaggccaaatccagatccaaagcacccgggactagctggaataacaatacccgtccactccccggccgattgtcttccggccactttccggcatttttctctgaggataagttacagtgtcctaaatctggggcatcggtggatttggggaccatcgtccgtaccgtacaatgttgtactccgtgcaatcctggttccatggcctagaactctatacagactagggtacaaaagtaccttgcccttctacctaggcaattgactaccccgtgacagctgatgtccgatcggcatttgtctgggcgggaatccatacaccgtctcttcccgcgtcgggaacaccaaaataggcaaagaagagaatgtgtgcgcacagatgggggggacattctcggagagtacagcgagaaaatccataagtgcgaggcatggaaaaaagaacggaaaaccgacgagactccacaagatgcccagaaaatccagtggaccggaccataaggcttttctttctttctccttccacatggtttttcctttttccaagaggggtatctcggcccatttggatccctcgggtataggctcgtccccagaacatggatgaccctaccatgccagcctatcaatctgggggaagaaggggatatagcacccaatcaagagtctccactaaccctggtcggggctccccgcaaagaagcgagatcctcgatcatcacgggagttacattgacagttaggctggagttgattggcgtcggctgttaccttggaccttctcaccccgtattcgacggaggtctccgtgcgacgttcctgcaatgttggttgtgttttcccccgcttgccactcgtcacaggtggaagaatcggggaagggatcagggtcgctcggcagagggtcgaatgagctgccatcccttcggaagaacacgcaaatttcacgggatgaggaattggactgaattgcttattccgtacttctgctgctacccttatatcataatattagttccatgtgcaagtgcaaacagccccgaggccgactgcatcagagatgctgtttcatcccacggagtaatccaatggagttccgaggttatacacatgttcatgtcacacatcggaaaagtctcatacaccgagtttttccccccggtcacatttcggccccgtccgatacaacgattggaccgccgcctccgaggctccagcgattggaccccggataaccccgcatttactttatattaggtaagaggttctggttcgttttgactttttcttttcttttctttttttctttttttttcagtaatagtatcgaattgtatagtcaaggaaacctagagtatttatatttgcacagtaactttggaagtccgaggagagggcaccaatggtcatgtgcctaatattcccatgtctagtaaatctccggcctcttggctttttgatatattatactccgtatactccgtactccggtggataatagtggggaagcttaaaagggaaattattggaacagtttccatgacatatacttgattaacattgcattccattcctccattcctaccattcctctgccctctgctacgacattgtccttccacatcctttctctacccccacatatggagtagcctctcagctgacaaaaattaataaaggaaactcccttgttcatctttgctaaccttttcccatattatccgagacatcccgtgccgccggaaccgttcgatttagaaatagtccaatccaagtgctaaaacaaagcctccagcgccgtggctggaaataaatacataatattatgatccaggaaaaaaaaaccccggtcgggatcaaatcctcttttcccccctttcctgacctttctcggcgcggagcagttaccgattccaacttatccgtcggcacgtggttcatacaaaccttaggtagaatatatcctgtcatcaaatttcttacctggtctgttataggctaaacacttccagaaaaggaacctaagttccggggactccgtacggaggaactccgcagtggaaatgaaaaggatccgaaaagaacaagccaggaacaatccaagcccccacatcggctcggttagaaatatcggtggcataccgagtctcccgagtccggatttggatagcctaaccgtgcaagatcgtttaccccgataaatccccggtggctaaaagtatgcactaatcaactgtgttattagcataattgtactctgcttattcgtccacgggtttatttccaaggtatttccaaggttgactctgcgaactctctgagttcggcgaattcaatcccgaaaagttctgccaatccccactcgggaccaagttgccgggttaggcaccttgactttttagcctgatctattacgacggttatgtgagctgttctccggctatttatgttgttgtacttttgttatatgggttattgcggccaactgaaatagcatcaccagccaattttgtctatagagtcggggacggaataaaatgcgtcggacatggaaagcatcgccagagtgggtatattatgagcgatcataatagagtccaaagacaagtcaatggaaataaacatgatatagagaagaaatattaaccaagagaagtccccaggaatgggatggtaaattggaagatcgatatcgtatcgtcaacggggacccagcccgatgactgtaatgcgtgtaaaggtttaaatgaagaacctagaaacgcaatcagtaagagacaactgccaagcacccatagcaaccacataccaagccgcaagagcgataatcagatacatcatcatcaacaagacaccctcaagccagtgagacttgccatcaccgatgaggtagttgacctataaaacaccagtcagtataattatactgatatcactttcccgctaaactgaaaccacttaccagaagaacagacatgaatagtacaatcacctggaatccgtcgaagttgagagtctgacgcagttagtaccagccctcaatccacatagtcgtctgcatagggctcatccataccatatcctcaacgccaatgatccacccaagaacaacaatcaggggcaaaacgagcagcgcaatctgcatgctggatccgacagcaacaccaatcgtaagatccatcttatccttgcatgcgactgtcaccgccgtagcgtgctcagccgcattaccaacgataggcagcaggatcaggccgacgaatgtctcgcgaatgttacctgtttccgtcaaggcatcgatcgattcaacctggtagatgaatgagcttactgcgatcacacacaaaaaaatggatctacaacggatcccggagaaacgtaaatatgcataccatgaactcagcacacgcagcgacaaacgcagtcgagataatcagcgtaagaacggcaacggtaatggacaactgcggctcctcgggctcctcgtcgagatcctccatctgcatgtggtcgggattctgtccgaccaacggtgtggcagtcattttgccgatctgggcaataccccggctggcgtcgccttcttcgacctttgcgcttcgccgttcgaccttctggctgggtcggttgtacatgtcggcgtgtgacttcaactggaagaagaggtagcagccgtacacgatgagaaggaggacgctggtgcctgtggtgcggtgtgagcaagaagatagataaagcgatggacacggctgggaagtcccagcgagtaacgagtaacgtacctcgagatagggcggcggttccatctactgttccaactatattcgaaaaaaaaaaactctcgttagctctctgtcgatttgcgggttctggggtgtagtcatcactgacgatcagaccacttgtggtaggcagtcggaatgatcaaactgctaacagctaatgcgagcatactcgcggctgtctgggcaactgttacgttgaaatgttgctcgatgcgagggataccaccgaggaagaaagacatgcccagcaccaggagtaggttggacaaaatacttccgatgagcgaggtctgcacgatgagggttttgcgctggaccagtgcgatgattgcaacgatcagctcaacggcattactatataggttagaaatgctgcggtggaaggagacaacggtagaacaaagcatacccgaacgaggcattcagcaggccaccgattgtttcactcgtactagaagagatgtgagtatggatcggatagaaccagatacatccaagcataccgaagggcaatctcttcagttgcgaaactgagcatggcagccagaggactagtggacgtctgttagcggaaggtcctcgatattggtgggtatatatcgctcacatgatagcaatgaagttaaccacgaatatcgcaatcggattagctccaacggcatatagcacaactgcgaaatagaaattagcacgccgcttccatacatcaacagacgacaaaaatagcaagacatacttccaacaggtgcagcgatcaaaagaacgttgatccacgagttcaagacagtagctctcaactgcgatgcaaaggtgaaagactgcttatccgaatgcgacttcttatcctcccattcatcgtcaccatggcgatgcttgaacttgcccaaaatgccccccttccgctgacgcgcttgcgctgatccaacagtctccgtatcgaccccgcgcaccgaggagacattgattggatcctggctcgccatggacggttcaggcggagacttgtttgtttcatggtcgctgccagcgaactccggcccgaatgtgtttgagtactccgggacattgatgccgtcgtgcatttcccttcggcgttgctggtctgctgagagctcgcccagggtctgggagtgggctagtccgccctcgagctgcatagagttcgatcgatgggacctggtttggatcttttggaatgggttgaaggaggggccgtaccatgccgatgcgcgagccgcactgcgaattttatctagttgtattgttagtatgactggccagttgaggttgagtatgtatagatgttggacttacgcatggtgggttgatgagtctctgtgtgtagaaatggacccgtgagtaaaagtgatggtgcaagagtacttaaatagaaaaaaacaaggacaaagcaaccgcaattaggacataagatgccaacagtgaggttgtatttcgtccaattggtgatacagccacagcgtggcttggacctgcgacgcctgcgacggatgcctataagggctagaggaacacgtacttcttcaaggtttcgagatgtgggtagcttagcgggctcacaggctgaagcgattacagtagtctaagcgctggatggggatgggcttaggattcagccacaggataatgaatggcggatccgcgaagttcaaaggggactcaaacactggcacgcagacaggggaacggtgagaatgatcgcgcccaagcaaggggtgggaggtcaacaaagaccaaacgagtgacaattatgaaacgaacggagagaaagagagcaaatggagtcggaaaatgaagggataaaatttgtctggtaacaattttctaggtttctttagagaacggacttcgagaagaattgagacacacagccacattcgtccgggacgatcgtggtagtgcgtactccgtattgtggtatagcgcctatagtggagtaaatattatgagcttagcgtctcgaaaaaagcaagctcggatcgctagactggtagggaaaggtagtgagcgttggtagttggtaaagagccagtcaggataagtatctgtttcaagcccagtgctataaattcatgttgcgcgtgactgtgtcagatatgaacttgtatgttgtatgttggacgaaactccgccactcaaaaagcttggaaccgaaagcttcgtcagtggaagctttgttgtcttgtgcttgggtgacttggcataatcttgttttgcgatcatcggcagtcttcaaatagcacacacatggatttgcttgggcattcctgcagatgtcatacgaatatacaacatagtactctgtatgttgtactccgtactccgtacggagcaatcgtggcacagagggtcgcaaatatgggtcttttgggaaatttccaacaattgtgtagggggtgttgacccgctcttggcagtgtctggatcaatcaagtctcgagtacggagtacggagtattgatttcctcagaacgccacaagccccttttctgttgtatgttgtatgtgttggttggtttcccggtcaagctagacgcataatcaaacagtcacgtgttagttttcaaggttgctggtgcccatatgtaagcgctggaccgttggaagtgctctggcacgctcccccaagaaatttcaatcctatcattagacatgctggtatccatattgacttttgttataaaccactcttcgtgataaggccatatgatcaatggtcagctagcctcgggcaggtactgcggacgtcggtggcttattttcactctttggccttgaaaagtaaaggctgtcgttatcccgaggaaacatatatccagcaacgctcagctcactcagctgcgctgctgacgtagttggttgtcgccctttcatttctgttgcgttggtgtgctgtaaggattgcagtcgggccgttggtgaagcgaggtgaagcgaggtgaggcagagtcagagtcagagtaaggcagaatgaacgaggcagagcaaaatggaagtcgagagcctcaaatttaaaaatgtgcaaatccacagaaaaggaaaaagtcccagccctatggatttcggcatcttaggggccaaaatacatagttgctgcctacctcgcgctagccacttcgagcttgaattccagttctccagggcttcgtgtctttcattaacttagtctgaaatcgatctttttgattcacattatccactttatctttacggagtacaaacggaggacaaacttcgcttcttgacccttgttcattgtggagaggttgccatgtcatctgcgtgattgccaaatggaagaaagttgctcctggattatttatttgcggatcctagatgtctcatacgcgaaccactatctctggcggggatgtgtgtacaacagtacggagtattgcctggttatacgggcttgatctagattccggctctaacgacactgagtcgaagtacagagtacagagtagacttattctggacttcggaaatgacgtctatttcgcagcgacaagttggtcctttacaaggtggaacatgtcatcagtatccacgacaaagatcctcctccgcatatttaactaatacgttcaccatgtccccccggtacggagtatagacagcaaagtaaagcggcgcttatcagtctcagctagtgtctcccactgcaaaccagtactggagagtttttttcatagccccaatggcctgaaaatgtcttatactgatagcaaaacaaggaatccaccgagactccatccccagcaggttattgttccgccacaaagcttggtaaagcaaaataggctcggagtacataccatgaagccccgaacgggagaggattgactttcttgtaggatatcgtatgctaggacccgcctttgacgtgatctatgatattcaggggtgcatatacccctgagctgcactgcctggttctgatctcgaatgatattgggttgtatgctgtatgttgtagattgtgcatttctttctttcttttgagggaaaaaaaaaagtattctggctatatcattatccccatgggaaagagagcggcaataaagacgggaagaaatattagtgcctgctgtgccgtctgatcgtccaaattaaagatgtttcggatattgatggtcttgtcccaagttaatggaatattcagaatattactatattaaacagtatatgtgataatatgataagatactactatgtatacaactgttgtactccgtacagcaattgtagcattgtcggatccaaggatatcataaaattaggggattgatatagccacccccctttagatcacaccacccccctttggatcagaccacccccctgcctaggaattcaggctcccactataccgccttcctgatcgggtgcgacactggattctgctatactttctgccagtgtagagttttctgccatataattctgccaccaccataggaattccggtttatatagtaaaaaaacatgcattttgatcacaaaaaaaatgtatattatcattgaattaagcatttgtttactcatattaatcgaatacgctgcttatacacttccccgcgcgcgtttccggcccctttcacgtctacattcacgtcttacgacttagtgctgggtctagtgctgggtctgggtgctaggtctaggtgctgggtctaggtgctgggtctaggtgctggtgttgaggctacgaaggaggactagtggatgaagtagcatggagggaaaatcgggaagaagatgcgtactatgaatctatggaaaaacaggctgtatatgaagcctgtgctaacaaaggaatggcaaactgacaaactgacatatcaaactgacatatcaaactgacatagcaaaggctcagtctgcacaaagggacaaaggcataaagacataccataccatgcatgtcaacagctgggtctcgatgctaggtctgggtgctgggtctgggtgctggcctcggtgtcgtgctgggtatggtgctaggtatggtgctaggtatggtgctgggtatagtgctgggtatggtgctgggtatagtgctgggtatggtgctgggtgctgggtataccagcgagctgtaagcgcccaccggtggtagaggcgtacagctgatattttgctaagcgtagcggaagcaaatccgggccggatccgagctaagatggcctataggctgccttttctatctagtgctaggtatggagctaggtatggagctaggtatggagctaggtatggtgctgggtatggtgctaggtatggtgctgggtatagtgctgggtatggagctgggtctgtatagtgctaggttagtatagagctgggtgcggtgctgggtgcggagctgggtctgggtatggagctggagctgggtatggagctgggtatggagctgggtatggagctgggtatggagctgggtatggagctgggtatggagctgggtatggagctgggtatggagctgggtatggagctgggtatggagctgggtatggagctgggtatggagctgggtatggagctgggtatggagctgggtatggagctgggtatggagctgggtatggagctgggtatggagctgggtatggagctgggtatggagctgggtatggagctgggtatggagctgggtatggagctgggtctggagctgggtatggagctgggtgcggagctgggtatggagctgggtctggatggtgctgggccggtatcacgtgatctgtcaaataataacgtcacgtgaaatccgggccgggcaaacatcctgccaaaagtttgatcacgtgatttagccctaccctattcacatggcgggtgaattttctagccaatcagaggccaggatctcagaattcgtaggcggattttttagcatagaccttgggtatattgcctgtattatttgcttcgctccgctcgcaaaactaggtataggtgctaacaaaagtgacttgtttttactatatgtttgcatataaattgtaggtatctgctatcgtcctatagtgttaggggcagtttgacacgaaggcggtgtaaaacttaaaggcggtgaggaatgcggtaggaaggtgtaggtgtcgaggtaaatgcggtacccgagtaggaaggcggtaggattagtgcctgattctctaggcagggggggggggtggtctgatctaaaggggggtggtgtgatccaaaggggggtggctgtatcaatcccctaaaattataggccgatgagatgtgaaacataaatattggcccgaaacgcccccagaagtaccctacacagtacggtatactttgtactatttaaggcacagtctctactagtccatgaaccagattatttgggatggtttctgaattgttatatttccgttcaaccttggatgtggtactccgtataatagacaagccttagccaaggatgcccagagatttcattccgaacgtcatagcatcgatcgtccttggcaacgaacaagctttggatatcttgtctatcatacaatattgtccaggcatctccatggatatacatatgtacatatatacactttaagtccggtgaacaagttacggaggaccagtcctgacttttccaatagattagcagaagagaagttccacataaaccctccagtcagggtccagggttttccgagtatcatcgagccgtccacacactagcgcttacacttgtttcaggggtggcaaataagcaaaaggactcaacgggaaaaggcttgatggaaggggacagtggagggacagtggaggagtagtggatagtagtggatagtagtggaatatcaccgccaataatggaggatatgaacgtcttccaccttgttcctgttcagatggattgccaatcacatctttcaattgatttaccaaaaacaaaaacaaaaatagaaaaaaaaaaaggactcaaacatggatggatgatatgcacttgatttatccacatgaatgcgcgtacatatccccccttcctccctcttcccgcagggtctcttttctactccgttattcccttcttagatttcttctttctatctcttatttacattcgacattcgctaccagagacaggtacctgtcagacattcgttaggatttaaatttccttacacaatgaaggcctccatcatcgctggtctctcccttctgggagcggctatggctgccgacgttccctctattgagatcaagggcaagaagttcttctactccaacaacggcaccgagttcttcatccgtggtgtcgcctaccagcccgaatacaccggtcgcaacggtggttccagcgagagcaaatacaccgacccgttggccattgacacctgcaagcgtgatatcccctacctgacccaactgcgcaccaatgttgtccgtacctacgccgtcgaccccagcaaggaccacgatgagtgtatgaacgccctcgccgatgccggtatctacctgatcaccgatctgtcctcgcccagcgaatctattgtgtccgacgaccctacctggaactcggatctcttcactcgctactcccaggtcgtcgatgccttcgccaagtaccccaacgtcatcggcttcttcgccggaaacgaagtcgccaacaaggtcaacaacaccaactccatggcctacgtcaaagccgccgtccgcgacatgaagtcctacatcaaggagaagaactaccgcagctccctggccgtcggctacgccaccgatgacgatgccaccgtccgcgaagccgtctccaactacctaatctgcgacgaagccgccgactccatcgacttcttcggctacaacatctacgagtggtgcggcgactcctccttccagaaatccggctacgccgagcgcaccaaggaattcgcagactaccccgtccccgccttcttctccgagtacggttgcaacgaagtccgtccccgcaagttcaccgacgtccccgtcctgtacagcgacaagatgaccgacgtctggtccggcggcatcgtctacatgtactacgaagaagccaacaagtacggccttgtctccgtcgacggcgacgacgtcaagaccctcccggacttcagcaacctctccaagcaaatggcctccgccaccccgaccggcgtcgaatccgccaagtactccgtctccaccaccgtcggccgcagctgtcccaccgtcggctccgactggaacgccgctagcaagctgcccccctcccccaacgccgacctctgcgagtgcatgtacaactccctggagtgtgtccccaactccgacatcaccgacaagcaggtcggttccaccttcggctacctgggtggtgaggatggtgtcatggccggtgtcctgtccaacgctacttccggtacctacggcgcttactccatgtgctctgctaagcagcgtctggcttgggctatgaacgtttactaccagaagaacaagggcaaggctggtagcgaggcttgtggcttcaacggtgttgccaagaccaagaagtccacctctgcctccggctcctgcgctactcagatgagtgctgctggttctgctggtactggtgctgtcagcggtggtcttgctgctagcactggtgctggtgcttctggtactggtgctggtggtgctacctcctcgggtattgctgctggtactgttccccaggctgtgcacattggtgtctggcaggctggtgcctacgccgttgctgccgttgcctctggtgtcttcatgatcatgctgtaaacttgagacttgttttgcatgttctggtttaaacttgtcttttgtttactggctgtcttacatagccccctattccacgagttggatttgtaggtttggcctttttttgtaatattgttcatacatactcctattttttaaactgctagcgggtgttctattatcccagatacttcaaaatccactgaaaatatttaaatcttctcttgtaatattgttcatacatactcctattttttaaactgctagcgggtgttctattatcccagatacttcaaaatccactgaaaatatttaaatcttctcttgtttgtatttggtagttcctcgggtacgaatggctgtcggcatgcaaatgtgagaactgtcgacttcttgattggttatgaatttcatgtcactgaccattctgatagctcatagaacctgactattggcttaaaaatgagaatctctggtttccagtgagtccgttttcactttcctttagtactttatcggtagcaagtggtccccgggaccggacgccgtctactccacatacaaggcttggaaagttgaacccggaggtatatatcaaaatgcaattacgattcgcagtagtctaaacatagtagatctccatggctatatccccgcccacaaaaatttgctttgtccaaaacatatccagaaaacagttcaatcaaatctgacagtgtctctccaacgacatccattccaatatacaagtacatagtaggtaaattttatctaccgtctatctcttatgtcgtattttccccctggtatattgatcccaggacgcatgcaaaaataacccaaaacaacgctcgcagagtgtaacttttttccaaaaccaacagtgattagttaaggccctcaggtacggtcaggaaagtattcttcgagagttttcaagacacccttttcagcgatgtctttcatagcctgctccatctcgtcggtgaaacgcttacattcgcgcaagtcatcaccgaagaggttcttgatttcgagcagctggctgggaccgccacggccggcctcagccgcagccctgagctcatcgatcatggggtcgacgacatcgaacttatttttgttgtcatcgaccccgttgaggtaaaggaaccaggaagccgcgacgaaacacaggcggcggaaaggatattcacgttgcttcttatcgctctccataatggcctcggcaatggatggcatgatgaactgtgggatcttgccggaggcattgaggcagatgcggggcagctggtccttgatcttggagttggagaagcgcttcacgagcgttttgcagtaatcatcaatgttgacgcctggaatgtccggcaacagcggcttcacctcctcttgcatcatctcccacaccaacttgcgcatgtgtgggttctgcatgacttcgtgtacgtattcaaagcctgccatctggccggggtagccgatggccgagtggctcccattaagcagacggagcttgtgcatctcgaactcctcgacgtcgtggacattcttgacaacctggacaccgaccttctcaaactctgggcggccgtcggagaactggtcctcgataacccattgcatgaagggctctgtgacaacgggccatgcgtcctcgatttcaaagtccctcgctagttcttttttgtcctcggctgatgtttgaggtgtgatgcggtcgaccatggcgttggggaaggcgcccttctcggcaatccagttcgcgacatcagggtcacgcatcaagcgcgcaaatgacactagcatgtgacgtgtgatagagccattcttctgcatgttatcgcatgacataacggtgaagggcttgaccttctccttggactctgcgtcgtggtagcgttttgctagagcagcgtagaggaagccgaaagttgtgcacggtttgtcttcgttgccttttttggtatcggcctggatatcggggtgatcgcttaggagctcgtgtgtgttttcgttgtagtagtagccgctttcggtgatggtgagcgacacaatacgggtatcggggtgggccatcttcgcaatgacagctttgcggtcgtcgggggcaaagaggtaggaattgatgcatccgacaacgtgggcaaagcttcccttgtcagagcgctccaggacggtgtagaggtggtcctgttctctcaggacatcacgcatggcagcatcgaagggttgcaaaccaacgccgcaaattgcgtagttcttctcattatgcttctccatcaactggtcgacgtagacggccagatgagctctgtggaagccgcccacaccaatgtggacgattccctccttaacagaatcatcgcggaaacgatgggttgggacttggacctgcccatcgcctgcgacctgaattgactgcaggttcttggtgttgagctttaggggagccatggtcagaatgaaagaaaagagtgagcttgagagaagaagaaatatttgcggctgaatcgaccagctcgcgagggtcaccgctggttttgaccgctgatccggaggaagaagattacatcatgtggactcaaaccgccacccctgaaggtgtccaccttcctgcgaatgcaaagagccatatggaataatcctttggcatctgattagtttgccttttggggagtggaccagtctgttcccagccttggaaagttgagaccgttctaataataagagcaccttgcgtcagagctgtccgcttccgatctcgggggccgagaacgttcttctgccgatccactggcccccttcgggaattttgttatgcttccgggatcctttcaaggtaaagataagacatggtatggggtttccctgtacggagtagggaataagtccaattgaatgaaaattcagacggactgaaaagtacagttcatattgtccataccgcaaatctgtgagatcatagctgaaatgggaaagccccacccgaggaaatccggcctggacttgccacttttttcatcaaagggataatgggggatttgggatgtaggaatcaacttgtgagtagcaattgtgtctttcattttaaccaattggtaagatggccgagttggtccaaggcgccaggttaaggtataccttaactccacaactagcaatagtttcctggtctcgaaaggggcgtgggttcgaatcccactcttatcaataactttcttttttttcatttctcaaacttttggttcctttattataggacatgttggttgaaaaatatattaaatacctttatatgaattctgatctgaaaattaacgaactgaagccggtgccggttgatgaaaccgggatctggatggatggaggtaggtacgagcaggtgtcagaatggagatgacggtaccatgcttgaagtggaaaagctgtgctttgaaagaaaagcgcaatgaggaagttgatagagctgctgagggacgtcgctatgtaatactttaaagccttccatatatgtcacttttctatatcacttacaacatacgctgtaaaagcatagtttcaagttgcctttatacaatgtggagaaataaacctgtcctatcagggagttcaccaccagaggccatgtcccatgtgtatcccatcccgcatatgatatagaatctcaaccccgacttcaggttctacccttgatcaaatctgccgcccgctccgcaaccgcataaacagtagcctgaatattgccactgggctcaagcgggaatacactagcatcaacaaccctcaaattcttcgtcccataaaccttcagttcagaatcaacgacaccaccaatctccctcggcaacatagcacacgagcccgcgggatggaaacatgtatacaagcgatccataacaacatctttcgcatgctccaagtcactcaagtcggccgtattcacaggcatgcgtttcccggccttgaggagagcggagaatggcgctgtctcggcaatgcgccccgcgaactgcaactgccgggccatgatctctagatcgagcgggtgcgacagcaggttcgggtcgtagatgggcttgtcttcactctttcccgaggcaatgtggaccgagccgcgcgagaatgggtggttgtgcagcatcatgatggagatgtagttctccgggaaggttttggccagcacgtcggtgagggttgtcttgcctgggttcatgtggagttgggcagggaggaagaggtagtgcgaggaggcgtcgtcgctttggaggagcatcttacggaggtgggaatactgcgcttgaaggttggctggggtgttatcgttgtcaaggtatttagagagcagggcttcgatttcttctgtcggcacggcaccgcttccatccgttaacgggagataggccatgcttagtggcatgcctgcaagcggccccccgcgagtctcctcgtagagcttgatgagtgtctggacgacgttaggatcacgcatgatatcgcccgagatttggccatcggcgatctcaaagttgatgctcgtgatgctgtggtcttggaggttttcgcccacggcgggattgtcgacgattaccgggatgccgtgggtctgaagaagatctgtacggccgatacccgagagctcgagcagttgcggggagtttaggctgcctgcgcagaggatcacttctttctttgccttgatctcgtgtggaccgtcttgagtcttgatctgcacacccgtggcgatgacgtctccctcttgttgagagaagatgattcgctccaccattgtctctgcaagaagtcgtaggttcggccgcgccgcgacatcgggggagtagtatgcggccgcataccctcttctccctgtcttgacatctacgcttagcgggcaagtaaaagcacccagtttgtgaccatcaagaggatcggcatcagtttcccagcctagctcagcaaatgtctcgttccaggccttgttaaacgggccatacacgtctggcagagatactgggacaggaccatcacatccttggttatcaattttcatgtaacgacttgtgccgagcagctctgctgtagcctcgctgggtgcggtatacgagtgaaatttccgaagatagggagccatgtcctcggcaccccagccatcatttccaagtgccttccacgcatcaaagttagatgcggttggatacataaccgcggagaagttcaatgcggaagagccgccgacaatacgaccgcggggctgcccgatttgtcggttttttacgtggacctatttattgattaggtttcgatacgagaagccgatgtttactgcaggcttacctgcgggacactcatgtaatcccagtcaaagtccgggtcgccatacatcgtggccaaaaatccaggggtctctatacgaggatcgcccatccgattggcgccagcttcaatgaggaggacattaagggaggaatcttggcttagacgatttgccaaaacaaggccgccaattcctgcgccgatgatgatgtagtcgtagtcatccatgttgccatttaacgagcttcgattactatggatgggaggtgacaattatagaatatttcagaaggataaagagttgacagcgggacaccggagcacatggcattcacggaggacgggagccccatatcctgttagctccaagttagctttatcttgttagctccgtattctgtaacttgttcggaaggtcgcttatatcccccggtgagactagtgtccacagtccattcaaggaacaagtgagtttgtatgctatttgttcatagccgagggaatggagataataggggaaatggtctctgcgagtttgacttggccccgactagtcgatattcgttccaatgacaggcgatctcttcagccttcaagtccacactggtaatttcatttggttttagcaaaaacggccccccacaacggcccataaatgtcctgatgatcgttttgtctggccaattaatagccagtgtgaaaccctagtgcagatttcgtagtactttgtacaatagatggagacaatgaggtttgttagccgtagactgacagctcttcacggctattaaagtttcttcaccctttatatttcatatatgctgcgtataaaggcccaaaactgatgaattaatgggaaaatgcaattatacaatgttttcgccttccccgtcgtgcgtgaccagctcatcgcgaacacaattctcgttgcggtcgccactttcctcgtcatattgcgcggtatctcccgacgaattcgaaaaagccatttaggatgggacgatgcatgctgcgtcgcagggttatttcacacatatggaatgcttgcaatgcaatatcactatgctcgtgtcggcatgcgacaccatatcacgactattcccccagagaatgcggtattgatcgcgaagatgctgatggtttaccaaatcgtctactacaatgccatggtcctggctaaattctcctacctcgccttctacctgcgcatctttgtgtccaaggaattccgcctcctgacgtggatctgtatgggatgtgctggcgcgtactggactgggagtatgctccaaattttcctgatttgcacacccttcgagaagaattggaacccgactctgcttggtcattgtgcgagtcagaatgtagctttttcaacaattggagcattcaaccttctcacggatgtgatgatcatggcattgccgatccgctttgtctggaaattgcagatgtccatggcgactaagttggcgttagttgggatctttggattgggtatcttgtgcgttaccctccgtttcctttccctactaggcttcccaccgctctaacaagtatcacagtatttcctcgatcaccatcatccgcatccgtgtgctcaccacggtcgatttcaccgacctctcgtactcgatgatctgggctgctttctggagcgtcaccgagcctgctcttgccattgccaattcctgcgcacccatgcttcggccaatcctcaaggccgcttttccgtccttgttctccagtgtccgtgccgcatactcgacacagccgtctacgaaacccgctctgagcaagaatagtacggcgaaacggacgcatggcatggatgagatggatagtgaatttccgctcacacagttggatcaagtaccaggatcggcggatggagggtcgttgaacgatcagtcacaggacggtcgcccgcactatacgtcttatcaaacccctaggtctgtcgtcggaacacctaaagagttgtcatagcatttcataatatcaaataaattttcctttgtacatttcccttcggtcttgataaacgtcctatctttacttggacttattcgtcaacgagatatcaggtctgttcttccctgggacctgttaacgtctgcttctctgataatctagaggttttatcttaacggaagacatcattggacttaggattatgccggcgagtgcgtatcagactgtttcatggtcaaaatatgtaccgcattggtagatggctatggtcgggatttgtttcgataagtgagatcttacaagttaaacaattataaggcgcttggaaggcctactactggtagaatatcttacccacaggtggagagagctgtaaatcctgctgttataaaccgtttaggcttaacgctaccggtatactctttaaaaacagtcctttccgagactacgaagactaccaagtaagaagtaagagacaactgaaaggacaaccgaaaagactcgacaagggctatttttgtatattggttcaaaattgttgcctcaccaactatttcccactcctccactcttccctttccttctatttcatcgaaactccaagctcacttcgtgtcctcattctcattgtggcaactcttgatgaaaagaacacttttctgagtttgaagatgaggagcgaaagcaactacttgcggatattataagccaaggtccctaggtacctagctgatcttccgggtgcaaaccttttcaccctttggttctcagacatcggggtgcttcgggggtttgcaaaggcgcttcaggaaaatgatcttacttccaagtggcggaattggatgtgaccagcatcgacttgaaatattcctggaatcggtaagtgcatggtgcatccaaaaaatgcatgaagaagtgcctgtacgataacaagctaacaattgatacactaaacagttacatcaggcaaccaacaacatctttgcttaaatcagaaaggcaaaagcgagaagatgtgagaaaggtacgctaattgagaacatagagacaaaataatgctgacttccttgcccttcagtgcctagaacgtgataacgccaaatgcatcctgaccagacgcgacacgcgaccaacccggcgcatggatgaagcctctagcgagtacatcgaggaatagctttttctcccaaagagaaaaaagggaaaaagagaaaaggagaaaaggagaaaaggaaaaaggggggaaaagagcgaaagaaagaacgaaagaaagaaagaaagggttgactcttaaacagagtgaccagaaagacgtatcttacgttaagaccggtcattcaccaagaccggggacttctgggactgttctcgttgttccagaagatccaacagccacgagtttggacctctacgtggtgctgttgacccgtagccttgctggcgaagtcaacacaagatcacttgttttccttgttttccttattttcccatgagctagatggttttccttgaactcctaccctctcaatatcaccaacgaatctactactgtcttccttccccaactgcagatcccaacaatttacacactcgggatctcaggctgggtgtggatacacccacacaagctagcaatactcctccaatgcaagacaaggattcagctacgcccgaagtattccgtacagagatgcatgatgaaagtagtacagctcaaccgctagactatagtaaaaccaaggtccctgtttatgacaagggaagactatcttattgtatgaccatgagttttggcttgtaatctacacgtagcactggcccaccatactgagactaaactatgcgaagcgtcatgccaagcataattggtggggcagttcttcagctgaagcatccgacatatacgcgcgtactgagataggcctgttccccgattgttgtatacccagtagcctagctggactgcccgtgcacgcaataggaaattacctaaataataaaggggcgttagcttttaagcttcccaaggtccaaggctacagacttcgaggagtggaagtggtcactcaccgtactttctacgtgttcgtattactacataagtaggcttctcagcccgttcacggctgaagctataaaacctaattataaggcaatttgggcccgctgtgtgagctgagagggggggcaacctgagaagatcgtaactttggatgtatcagatctgcgatacccacatatattagcgaataaagacacagactctctgccaatccgattttttttttacggggtgcatggatgtactctctagatatgcatacccctctactccatatgtgacgagataggcgccgctgtactcccatcacgcatattatcgtgtggaagtgggtaaagttaatgcacgtcgatgctagcgaactggatctgcaagatatagctgagtacctctgtcaagcgcccaattcggtgtgttgggcacttgacatagttatatacatgtattaagcggcacccccccccccccccccagagaatcattatttttcgtaaagccttggttttgatcttctgaaattctcgtcaagatgggatccattgctcctcaacgaacccctttgcggattttggatgccaccgccgataaacaccccaatcagctctactgtgttcacccggtctcctcggatatctctcaaggatggagagacatcacctttgcagatctggcaaatgccattaatcggatggctctatggatccaggaaaatgtagcctcttctgatgcaccacaaactctggcatacatgggagcaaacgacattcggtactgcgtattcatgtttgcatgcatgagactcagacacagggtaagaggatcgaatttttaggtaattggaaatttgttgacgttgagacaggcgctgcttatctcccctcgcaactccgagtcagcctcaagtcacctcctcgatgtcactgggtgttccaagtttgtgtatagccccgagaggactaaacagattgaagaattgaaaggggcgaatccatcattgcaagcatggttggcaccaggtttgtgggaggtgttggatagctcagcttctgcgcccgtggtggaggagcccgcggaggatccagaagatcgcattgcagtctacatccacagctctggtacaactggtgagtgcatgtcattgtccagcttcttacctggactcagatcagaacttctctaacactttcttcttcatggcaggcctcccgaaaccaattccaatgaccaacgggtatttcctcgtccttgagcggactggtcttctgccccttcctgagaacagacaaagcagtattgtggccatcgcagaaagaggtaaacgggtgtttgtcatgagtcccttcttccactttatgggtattctaagtatcatgaagcctatcctcttcgatactcctttcgtcttgagccccgagaagcccctgacggcagagctcttggcccagattgtcacggaaactcacccggagacaactctcattgcaccttctgtgctagaggagctcagtcaatctgagcttggtatgcagtctttgtcgaagttttgcttcgttgcctttggaggagcacccttatcccaggaaatcggtgaccgcatctccgaggtaacccatctccagtcggttatagggtcaagcgaaaacgggctcttcggagcgttgaagcaccaagacaaacgcgactggcggtatctggaatggaaccccaatgctggacttgaaatgcgagacgccggtgaaggctttttcgagctcgtcgtccccggtggggagggtcgagcgggccacgctgtcttccatacataccccgacaaggacgagtacaagaccggcgatctctttgttcctcacccagaaaaggaaggagtttggctgtattccggacgccgcgatgacgtgatcgttttgagcaacggagagaagttcaaccctaccactatgcaggagatcatctccagccacccacttgttgctcgagcactagttgttggtcaaggccgctttcagtccggtgccatcatcgagcccgattggtctttatggagtggcgagcccagcgcatttattgatgagatctggccgagtatcaagaaggccaatgagtctgccccggggcatgcccaactcatgaaaaatcacatcggggtagcgtctcaggcaaagccactccagcttacaccgaagggtactgtcaagcgacgtaccgtgcttgttgactatgccgacgagatcgacgcgctctacgccgatggcgatcaggttgacgttgcgcagatcgcgaaagacgcaacacgagaagacattactgcccatgtcactgcagctgtctcggagatcttggacgttccttcctttgatgagaacactgacattttcgcatcgggtctagactccctacaaaccctcaatttgggtcaagttcttcaaggctctctaaagtctgctagacctaacttgggcccgatgttcggtagccagcaactttactcccgtcctaccatcgcccaactgtctggatacgttctcaatattctccaagggaacgactcagctccggatgcagccactattgaaagcgatagcgaccgggaaacgagaatcgctgatctggttgggaaatacactgaagatttcggcaagggtcacgcagttattctcactggatctactggctcacttggagcttacctgctccacgagctgctgagcgatctcagtgttaccaagatctactgtctcaacagatcggatgatgcagaacccaggcaattgcaaagcctgcgcgagaagggactgcgcacctttaacaagttcccgagccgagtggaattcctccaggcacaattcggtgaagagaaatttggcatcgatgacgccaaatatgaccagatgctacaggaggtggacactataatccataatgcctggaaggtgaacttcaaccacagagttgaggccttcgaaaatccccatatcgcaggtgtgcgtcggctcgtggaattcagcgtcgccagcgaaaaggcagctcacattcattttatttcgtccatctctaccattgaaggttacagcccggagagaggtccttcaattcctgagattatctttgacgatcccagctcggcactccgacagggatacggagagtcaaagcatgtatctgagaggatctgtgctacggcctcggccaagtgtggcgtaccgaccagtatccatcgtgttggtcagataggaggcccgacgacagaaaaaggcatgtggaataagcaggagtgggtgccatccttggttgcgacatccaagaccatcaagcagattccgaatggacttggatcggtgtccgtgcagtgggttccagtggtaagtattgcctctgctgattatttttttttattcaaaatctaataaacctcgattattcaggatgtaactgcaaaggtcatcgttgacatcgtccgaaccagacgtggaacgcaagaggatgagccatgtgcggccttccacatcgtcaatccccgagtcgcagaatggtcatcacttatcccggcagtgactaagtacttcgacatggaacaggtcgatatcaagacatggatcgagactcttgagagtttcacaaaccccacagaaagcgatctccaggataagcccgccctcaagattctcgacttttttaaggctatctcgttcgccgacgaagctggtccgtggaccgaaactaccaagacccaagctgccagtaagaccttgcaacgactgggggctattgatgccccccttatggagaactggataaagcagtggaagttttgagaggtttgctttggatgcaaggtcacaactcaggtataatgaggtatttggctggcttaactatacatagtgttggaatgcagaataacttgggggtagacattcttatacatatgtagactgcagtctggatactaattgtatacagagcatgtgggaaaaccctgcccagcaaaggacattctgccaacttccttaggcatgaggccctaggggccctagtctcattctatccaaagggggtgttggtcaagcagtttcgatttttactattttgataacataaaatttgcagtatacctaatccagaccgtatagtcaccgcgaaaagtaaaaaggttaactactagtggcaaggttgaacttataaaatcacgatcagaacagcagtaccgaccaccagagcactcatccccatagccttctcgatgtgcatgacagcagagttcttcttgggctcagactcactgttcttgtccgtaccaccggagtgcttcttcgccccaggcacaccatccttgcccgatgtaatctcgacaatatcgtccgtagcgtaattccagctgcgctctgccaatgagatctcgtcgttttcaagatcaaagactgcataaatcttgctaatgaagttggagcccaaaacgatgcttgcctcaaattggaagttggtgttctcacatatcgtgaaatagcacgtctcctcaccagaaacaaaacgctgagacgccgtgtgcctttcttggcttataaaatagctgaggtagagtaggaaatccaattccccgaatttgaaatttattgtcgagttctcgcccactgcgctgcaagagaagttcacttgtccccacttatccggaacggaggtgttgccaatttgggcattcagagcttgagccacggacttgggcacgtaggtcattccaacggcagtgtcaaagacggcatccagcggaaactcctctgatgccgcggatgtttcgttgaccgaggtaccatccatgttgatcgagatgccatccatgttaatacggagagcttttgtaaggtctgatccgttgactatggggaaagtgtagagggcgccgtcgtacttcgccttgttgatgccaccgaacagagctgtctggtcccagagactgaaagctggagagttaatggtaccagcatccgctaatgcctgggtcagggaggtagaagatgcattgccgtatccaagactcaaggtatctgaaaagagcacgttagtaattataatgggtaggtttagatagcccggacgtactggcaatgattctatgctccgtgacgatccccattttcacagtgtccatcgtcacaccaccaatcgtcagaacatcattgacaaagtccccaccaatcattgaacctgaatcatcatatacgaatatctcgtcgagctttttggcagtggttgaggtactcatattgtagcctccatatccaccacaaagggaccggttcacgtagagcccgcaatcagggttatccacgctcttaagccaacagccattaccccaggtgtgtagataagctagaaaatgttggggcggggtgccaaaagtcacatttgcgacataggatattttctggaatgcaaggttagcctacaagtcattccaattcttagcgctggacctacacgagcatcttcgttatcaagatcgacgtcgacagtcttcgatcgcctggaaagctgacgcgaagtgtcgcgcaccattggcaccgcgagaactgccagactgtctctcttctccagactcgatgcgttagtcaaggctaagccagccaagccgagtaggaaggccagcccactgcgcatagtgagagatacgggatagatgaagatcagataaaaagcgtagggctggggttgaagagggaaaaaaaggaaagaaaacgagaaggaactttgcgctggcaagtacggggcttattttttcccaatttttcccaaaggcaaaatccctccaggctagggggccggctaaaacggcttagcgagggtctttggtggaaaatgctacatgaggctaaaagaggcgttccgggtccattcggacgttgcccccatctaatgttttcaagcctcggagcacagtcattttgccccaaaattaagtgtgatcaataagcgtaattttgagaccttctcaaagaactacgtagtcgggacttcgtaaagagaaaaaggtgttttggcccacggacctaagatgctcagatcgtcttgacagggnnnnnnnnnnnnnnnnnnnnnnnnnnnnnnnnnnnnnnnnnnnnnnnnnnnnnnnnnnnnnnnnnnnnnnnnnnnnnnnnnnnnnnnnnnnnnnnnnnnnttctctgaccgaccttaccacgtatatatctcccattcatggatatcacctctcaataggatacacaactatgcgatccaaatccgcacctttgtgatcaaacccattatatagtcccccgactgtaatggtattcctcttccccttcttcagtgtcagctggagcggagtagacagtatgattcccttgtgggtatctctttggtatagagtttgtatgctcgacgggtctccgttaaccaccacgctgctaatccgacgtagctgccatgaaccgccaattctgtccggggtacctccagctattgaatgtattagaatatcagaacctgaaccaggtcctaggcagcaaatggaagagtacttacgttggtcgccgaaacccaaatcgtcagtgtctaatagtaatgttagtattgtgcataaggaaatagaaactatagagactgcagacgtactttgatagtagaatgacacccattggggctcgccagatccctcgatattttcaaacgtaacggtgctgtcgtttccatatattccagtgagaatcacgccgtcggtagcaaagttctttcagaatatcatattagcgatagtctggtgtctgaaacagtagaactatacccacagcttcctgcttatatgtatcaccgtgcgtcttcgcctgtttggcagtgtatgttgttcccttaacgggttcccactccccggttttcctgaaatcagttagtatggatgccatggtaaaagtagaagacaacacccgtacacatcaagatcataaacatcgtgccactctaactctagagtcttcttagactcatcagtctgaacaggcaaccagatataacgactgtcccagacagaattggagtcccattggtctccaatgtacaagtgcgtcgtcttcttcgtcccctcaattctgagcgtatatccagactgcgaattgaaagtccgcgtatttaacggggcaacgataaatggctgcgaccaaggaccgcttagtgagtcggcccggaatgccaccacatctgaaaagtgagtcaagcgatcatacgcggtaataaagcgaacctcttactgtttggcctgtatcctgttttgtggctcataagtgcccagtagctcttctccgtctgcataatagtaggtgcctcaagatcgaattttgggaatcggtacacgacctcatcgagcgccgtgaggttgttattcatgcttgtgaggtacacatctcgcccatcttgactatctccgttcgagtagagggcatatgatcggccgtccttatagtcattgaacaaaccgaaatcttgggaccagtttccaaggggcgctgttgcgtcaacaaaagtgtacgggccctcgatcgtggaggagaccgcgtgaccttggagaaggagcccataggtggagttgtccgcatgccaccacatctgtctaattagttttggaattcaaaagttgagggatttccaatgcatacatgataatcctcagtctcggtgctgtaggccactttaggtcgttggatcacgccaccgggggcgatatatgggtgtccctcgattggagctccacttgtcagaatatcgacctatttccagcacggtcatggagatttacctagggccagtccccccgatttccaagtagccaggtcctccgaactataaacagagacgcctccgccttccggctcctcttctgtcttgtgctcaccaaaccaccaaaagcggccagacttctggtcaaaggtgatcccagcaccatgtgcattgatgaagttcccgtcagtgtcgcgccatctacctcctgggacaatgtatttagtttccactgagacagccagaagggtagttagacaagccgataacagtcgcatcttgatggtatcgccgattggttactttaagatatcagaaaccataccaactttcaaactgggttaatttatatcatcgtctagtcgtcggtctctattgtaccgatattgcggggtaaaagaaagccgatattctcttcatcttggcatgaatacgacatatgtaatttggttttcggaatatttccccttgcaattttgctataccccttttgcgcccggcatacatgtacgttgtacgtcgtcaatctgatccacccaggttcgccattagcgcacgatgttttccctgttatcctaatgttatgaaaggaatcgcagcaaaaggcgtcaaaatgccaagatttaatataattcgatctccacaataaaaccataaagtcccaatggtgccgccattttattggatgctccgtggtggctaacgggcgacggaaggtgattatccgcctgctcacgccgtctacttagtattgcatgggaatacgaacaaaggatcggaccacgggtaattggaaacttttgaggctaagacgctcaaggtggcgggtagtttcaccttttttgagtaggtagatagttaacggcgaagacagtgagagaaaatataataaatcgatgattatgaaagaaagggatctatttgccaaggccttaagcagggagtttatcgaggatcaaaggggtagaaagggtgttattatagacatatcggcctttataaatactttcgttccagttttgagccaagctttaagtcaaccacttgactagactatgggtattcatactgtaggaatatgcgcagctcccatatctattctgagaggcggtcagtctacaagtgacgggatgttgtaaggaaggaacaaggagaagagtatgagcttgcgttggcttcaccataatggctactagtcaacagcaccacgtagaggtccaagctcgcggctgttggatcccctaggacgcccactgctgtcctaggagaccccggtcttcgtagaagaccggctgagttactctccctgagagctaacccgggttgtcgtatgatagtcactcttataacagccaaccgtcggtaggtcggggtcgggaactgcagacactcgtctcgcagaaactgggttaggtcgggcactgcagacactcgtctcgcagaaactgggtcgggtcgggcactgcagacacttgtctcgcagaagttgagttaggtcgggcactgcagacactcgtctagcagaaactaagttaggtcggacactgcagacactcgtctagcagaaactgggttaggtcgggcactgcagacactcgtctcgcagaaactgggtcgggtcgggcactgcagacacttgtctcgcagaagttgagttaggtcgggcactgcagacactcgtctagcagaaactaagttaggtcggacactgcagacactcgtctagcagaaactgggttaggtcgggcactgcagacactcgtctcgcagaaactaagttaggtcggacactgcagacactcgtctagcagttctcggttggcgcgagtagggtggttggaggagggaaaatcaagagaaagggggcgagggatgggagcccattatatgtcgcctttccggctttagatattgctactatgccccattcagctatgatcgagtccgtttaccaatagggtaaacggaatatttaactttctcattcccgaagcatactagtacatattgattaacgttaaatcaaccactggattctagcgtttaccatgggagccgtcatccagaatggatcccccgtatacgctctttactactttcactgttcgggaatgtattcactcaaaccttggatcaaggcgacctggtaaatattctaggcgtgaagctatttatgatgtaatctacaacaatagaatgagcctcaaagtttcatcttctttcatcttctgcaaggttgtcagttccggtacgtcgtggggtgtctcggcacgtcaaaaccattgtaccatccatggatcatatgaatatttggtcatcgatatggacaaaaagagactaacaaaaacaaacacccgcacgtcagcggcttagcagcgccatcccgttgggcactgagatctgatcacaagtactctggggatgtagagaagtgttgggacaagtcctgtagttggaaggcaccaccgttctcctcgtagacttctcttcctttcttcccccacaacgaagtcaaagctctcttggtgtgggtctttttttttttttttgccccccttctcgttgtcggcggtggtcccggttctggatctggtgccggtctcacttccagcgtaggcggcggatgcagaagtgctggctacggaaggtaggtcccgtgatacctcgttgccgcatcaccgtttgctgtatgaggtcattttatctgtttcctcggatgtcctttgctgctttttataggtgtctcacagacagggagattatttccatatctgtcgatcattggcaacgtgtgttgcacatcccacagttgacggtagacccttttttttctcacaatgcttgaccctcatctagcaaggaagccgcgaaggcccacgacaacctagctgacctcttgttccacgcacgctggtctccgtcggtccaaccggtgttcctccagggtgagacgagtgaaatgaagtctgacgtgtatggcctaaataacgtgtgccatttctgctggttcaagtggagctgttcggtaagggccgccctgtcacatgtcaggttccaaggtcgcttatgggatgtttgcatgatttgcagaaacaggactacctttacccttctgggttatcactccacttctcttccttcggtcccttttcgcaaggatccaaaatcttaagcttactgcacagatctggcgcctaacagattgtccctccgtattgcagggattacgatgaacatcgtttagaaagaattatccgcaatgtcttggcaaagcgaaccggcgactatgctgtgtgctggaaaggagaaacccccgaaacatgtggatccgttgtgaggatcagcagcggtgtacgcagtacgaattaaactatcgatgatcgttcgggaattgtccctggaaaagtactaggctgagctgttggcgcagggatcgccatgagctagccgcggcacgctggccaagtcttcaacggcttttggtaaaaatggagaacaatgcaaaacgatccccggtgttcagggggaaaaccatgcataaaagccgggatcatctctcttggaaggccaactcactcatagtcgttctttgtcaatatgattctctcttatatctttggcctgctggtcgccacgtccggcctggccaaggccgttaacatcactggttacgaatatgtcgttgtcggttctggtgctggcggtggccctctggctgctcgtcttgctttggccggtcacaagacactgctccttgaggccggtgatgatcagggtgaaaactacaactacaccatccctgcttactccgccagagcctccgaagacgagaagcttgcgtggaacttttttgttcgccactacgaagatgacgagcgccaggcgcgtgattggaaggctagctacgacacacctgatggcgggatatacaccggcctgaaccctcccgagggctcgaccttgaagggaaccctctacccccgtacaggtaccctcggtggttgcactgcccacaacgccttgattgcagtctacccccaccagtccgacttcgaatacattgagaccatcaccggcgataactcttggacacccgacaacatgcgcaagtactacgctaagctggagaacaacggttactcgcttcccgcggtcaagggccacggttacgacggctggctgtccaccgagaccgcgcctcttagtattgtcttgaaggatactcagctgctgagcatgctcaccggtggtgcccttgcgctcggtaacttgaccgatcaccttatgaacattggcactctgctacttggcgatgccaatgctgataagaagagccgtgacaccgagcccgggtactaccagattcccattgccaccgatgacgcccaccgtaatggtcctcgcgagttcatcattgctgttcgcgatgctaagaacgacgatggctctaagaagtaccctcttgatgttcgcatgaacacccacgtcactaaggtgacctttgacgagactgaaaacccaccccgcgccaccggtgtggagttcctcgagggcgaacacctctacaaggctagccctatgtccaaatctgctcttcccggtacccccggttccgccagcgcttctcgtgaagtcatcgtttccggtggagtatacaactctccccagatcctcaagctgagtggtgtcggacctgccgaggaacttaagaagttcggtatcaaggtcatcaaggatctcccgggtgtcggcaccaaccttcaggaccactatgagatctccgtccagggcaagatcgaggaggatttctcctgcttggacaagtgcaccttcagcattcgtggccaggatgacccttgtatcgatgattgggagtctcctatccttggcgaccgtggtatctactcatcccccggtctcgccgccactatgctatacaaaagttccaccgccggcgatgactttgacattttcgaattcggtggccctgtcaacttccgtggttacttccccgactatagtatcaacgcgactgacgagcacaactggttcacctgggctattctcaaggctcacccccgcaacaccgctggtaccgtccttcttcagtccgctgaccccctcgacatgcctgagattaccttcaactacttcgacaccggtgtcggtgactacgatgctgatctcactgctttgtacgaagccatcgagcttggccgtgacgcgttcaagcgccagctcgtcaatatcactgaggttctccccggcgctgatgttcaatccgagggagatatcaaggattatgtcaaggatggcgcttggggccacccatgcctccctgcannnnnnnnnnnnnnnnnnnnnnnnnnnnnnnnnnnnnnnnnnnnnnnnnnnnnnnnnnnnnnnnnnnnnnnnnnnnnnnnnnnnnnnnnnnnnnnnnnnntgttaccaaggtagttttacaagagttgttaataatccggaaattcgagcgacgaagcagctgatcgggttccatagctcagttggttagaaccacgtttattttttgtttttttccttttaggccttaggtctccccaaatacataggcgtctgttatgttagacctaagccactgatgttcaacagttgaatccaagcattactatttctagaataatgacaactctgttgggaatcgttctagacaatcaatctctacacccgctatccccgccctcctgtcaaagggctctccagcgacaggggagagacgttatcacagtcgtatcgtttctttagcaagcgatcgccctgaggaaatacccggctgaagaaattgggcatcttgcgagtcgtgatactctgtatagtcgtcctttcaccgaaatagagtgaggaggaatcttcaatagttagccaagttcgttgacaattattattcgagtcaagtcagtggtattattcattgtacacgcgaagaacacatatttttcgccccagtaattaattataattccactaaaaggtagaggagggcgtatattagccatagtcggttgacagggttcacaaccacttcatacgtctcgcaatatagcttccaccacccacaacgcctgtaactcccgtaaaagcaatcaaggatccatatccactcccatatccataccccgcgtcccccttccatggcatcccatcaataagagcctcactaaggggtcccgaaaccaagttcccgactcctcttccggccgcaagtgatgcaaagaccatgctggattcagcggaggactttttgcggactacctcgcgcataatgccgggccaggtgctggtgtatgagcctgcaaagagaccgtatacaattgagaagacgaacagaggagcaagggacatcgaaaagccccagatcaggaatacaccaatagaggatcctacagttgaaaccaggatgcagagcgtcacatcgagtttgtcaatgatggcgcccataagcacgcagccgaccacggaggccaagttgaagaggataacagtcaaggcttggagggaggttgaggcaccgatcatgcctgcgtaagtcgggaggtagatggatggcaagaaaaacccgagggcctcgacagtattgcaaaactcgaagagggcaaaggtggacgtaaacatgaaccggaagttcgggggtggcggactgggtcggttatctgcgatcggcaagcgcggtttgacgaaatagaccagcggcgcggtaagaataaacaacacgactgcaaaggcacgcaaggtaacccggaatccatatctgcccagcagctgttccatgacgatagggaggacgacaccgccaattccggtgccagcccacatgacaccgaaagcgaggccctttcgtcggtcgaaccactcttccattagaaggatgcagggggcgtaggcgatgctgccaccgagtgcatagaagatgccttgggttacgataaggtggttggtgtttgtggcaagggagctcaagccgagagcggcgcacattaatagcacacctagaccgcagccgaaacgttgatatttgggccattgtctgtaggcagcgaagacaagtgggaggtcgagatacataatcccctggcgtataaaggttagctcgggctcgggttgggtcggaagatggaatattcaattttaccatagcgcaagttccgacaacagcgatattaccggagtccttgaattgggggatttcgccatagtacgcttggaacacaccgtaggtgaatgcgaatccccagacgagagcctccataacgaagcacgcagcgaggaacagccaggcattcattccgccgtcgatgggcggtagttgcgcatcattttgagtatttggtgaatcgatatcaccaatcgtcccggctaaggcagtttggaccgctttttcagtctcgtttgccgctgagtatgatcccattgcttcctccatttcagagctagggccgacgatgaccaaagaaggaacaggtagggaaatattccctccgtagaagtgaagaagtctttgtaaattgtccaaaggttagcgaacccaataatccttaacacacgatgaacacatgttatagcaaggtttcaggacaattcaagaaagataagctgccaagccacacggagaaatcaaccacagggcgtagaaaggatccgctggtccaatcagcgttaagtgggtaccttggaaggcgctaatatgccaaccttgaaagataggtatccactcgggattattaaccatggaagacacccgtcgatccgtggactcggttgtagaaatttatggtttttgaccggcagtatattatataatcaagggttgtatggatggtattttgccaggagaacatttctatgaaattagtatgtgtattttattagataactatagaaattgataaattttatgtctacttatcgaacctcgtggttcttttaatacaggaactattatttactagaatttgtactgagggaatagtaaattggcggtgtagaaggcggtcaaaagttaatattggaaaaatacgatatggcgcactggcggcgatctagtgcctcgttcctatccttatggccgttccgtataactctttgaagagaaacaacgaaggaaaatgaatctaaacctagacgaattttattaaaacagaacacgagtgaaacccgactggaattttttttaaccacactacaagaccgccgagcactgtgactgaccaacattcttgatcaaactccaattcactttgtcgatctattccataccaattgaaatctgagcaacaccgaattcactatagttactgcaatttactgtacattccaccatctgctagcagccctgttgcgttcacataacggctcatctcctcacaagccaagaacagcgccggaccagccatatcattcgggtctccaattcgaccgagaggaatacgctcttcaagggcggccatcttcgtagggttcttcatgtcgtgggcggctagcgaggttccaatggtaccgggcatcaaggcattgcaccgaatcttatctttgccaagggcgatagccatagactgcatcatagagagaatagcagctttggtaggagtgtagtgggtttggaatccaccaccgagcagagcgctaacggaggaaacgccgatgatggaaccaccgtgcccttgtttcaccatttggcgagcggcggcttggcaggagtagaaggtgcctttaacgttgacatcgacgctgtgatccaaaagagatggttcaatactaggttcattagccactggcctctggtgggctggagaagaacccaaatagcatgtgatcctatcgtccagacattaactcacttcaagagctctgccggtttgaatacgccagcattggcgacaaaaatgtctagcttcccccattgcgagacagcctcttgaattagactggtgcttgtctctggtttggtcacgtcgccggcaagctcaaggatcttgcccgccttgatgcccgtgtcctcgattgccttgacctcctcgaggagactgtggcggaggccttcatccttgtctagtcccaaatggttcacagcgacattacatccttgactaatgtatgccagcacgatcgcacgaccgattccagtggtgccaccggtgacggcggcggtcttgcctttgagcaggttccaggcaggtagcgcagccattgtgcaaagagagtgggagtaaagggtgggagaactcgaacaccgatagagaaagaagaaccaagtgtattacgtattgcgtgataggaaattgcccaggtgtgttacttgttatgtctgaatctgagcttagggtacgcgcttcgcggggaccgggaccggagtggagtaggctccgtctcgaggcaccaaggcactttaccacatgtttccccaacaccgtctcggaccatcgccgacgtgaggggagctatgatgacatgttttccttgcacaagaccttgttcgagtatttctacccttcgaaaggaagtataaaaaggacaggccgtgtcatgaatttttccccaagtcaataatccgcctctcccttacaccgcgattcttttcacaccatccactatgaccgccaccgaaaaccccgtccctcacactcaggtcgctctgagtggaaaggtgattgctagtatgtgtcctacaagctagacaatccaaaacatagttagctaatatcagattgctttagttactggtgctaaccgcggaatcggtttgggtattgctgagtgctgccttgataatggcgcggataaagtctactcgatcgacattggtgagactggggatgactttgccgccttatctaaaaaatatcccggcaagctctttgctgttactgccaatgtgaccgaagaggccactattaccgccgcggtcgataagatcatcgaggaggctggtggtctacacggaatggtggttaacgccggacgtacccatcataaggctgccctcgactttactaaagaggatatcgagactctgttcaatgtcaaccttttcggtgctttctatactgcgcgtgccgctgcgcgcgcatttatcaagcagggagtaaaaggctccgtggtcttcacagcatcaatggcttcttaccgccctaataaggtttgtatctatctatctatcttaactttcacgcgactagtactaataatacctcctagcgtgttccgtccgctccctacggtgcttcgaaggccggtatccgtaacatgacccataccctagcgatggaatgggcacagtacggcatccgtgttaatagcgtatcccctggcctagtcaagaccgctatgacatactgggtacctcaacaaccggactgggagcagcagcttaagtactatggcggcttccctcgcttggcagaagtccaggagctcggcggtgcctacgtgtatctcttgagcgacgccgccagctacactacctctattgacatcccagtgaacggagtgattggcagtaagtgattacaataccaactctagttattttaaagagactaaccttggtagtctgctaaacggggttggaaaggtttggcgacaaggacagcgctagacgtgaatagattcttttacttcgtacatatctatcttcattttgttgaggaataaacccccttcaatacatattttcttcaggagactattcggtattattgtacaaaccaaagctactagacacgtgcacgccctgacgacttctcaagcaaaacacagcattgactgagatgacctcatccttcgttgctcttgtcagaggaatgactgatataaagatgtgtgtaagggtgatggattgaccctataggggaagtatactatctaggctatgaacagtccttcattacataatgattggtctacattcatcatcataagataataggttgataaaggatatggatatgcttgatcaacttgtacttgtagctttacaaagggcacaacacaatttaggaataagcatatatattgagcagtagtccaattgaagcctgcccttaatgtgtgagatggaaatattagacccagactaacctcatccacagtacaatgcatccaaggcaggtgttttgcagctggcaaagtcactcgcagtcgagtgggtggatttctgtcgagtcaatgctgtctctcccggctacgttcaaacaaaaatcatggaatatgcaccccaagagatgcttgacaaatggctaacgcaaattcccgcccgccaatttgcttcttcttatgagctgaagggagtaagaagcgatgacaagctacttcatttggcagtgagctaacttgacttaatctaggtttacctattttgcgcatcagatgcctctagctacatgacgggatcaaatctggtgatcgacggcgggtttactctcccctaaacaaagaagggcatcttggattaaagtagaaagcttcaaaatgatagacaagcaagctattaaagcaatttctggcttttacgctgataatatctttgcgcctgggtgccaaatccacgtatgacttttagggcttctttaatcacaaaggaaaaatgtagctaccaatgaacatgcttagggctatttgacactcaatgtaggacatcatactagcgctttagagattcgcttatatcacccagtacgctcttgtagtatcggggaccgctctgcgcgatctcatttcaagccccttgagggactccccttgtcaaagttccccttccgataatgaccccacgactgctgggccttcggagacaggttaagaggacgagtcgctacttggtgtcccttcctttttcagtgggaacgatgccagaggcgcaggtaaggaggctggccggtttccagaaagcgggcggacttgcgtacctgtttgtagtcggacaacgtggttgccagattctgaggaaccatcatcctgtcagatgtcgtgtcggggatcgttgtatcggccggactgtacaattagatggtggacggcctccgaagattgaataagacttagttagagctttgagtagacgaaaaataaaagttccaaatttggtcaggtatagtcttgtagcaaattatctctaatgggttcgtcccttcacagtgccgtcaatgccttccaaatcacgatacagacgccactcgtagtccaaactgggatcattgaagcgagccttcgcatccaaagtcgcgattttagccatatcctcaggctgcaactcgaagtcagcctcaagattctgctcaatctgccaatcgacgacacttttagggatgactgagcgacccctgttgacgccccaaacaagtaccacctgcacagggctcttttcatatttctcgctgatctccttcaggataggctggtcaataacccggatcatgtgagcaatctccttggaccatccggtctgtcggtagaaatcgttcatgttacccaaagggctaaactgaacgacgtggattccctgtgacttcagccactcaccttttgctgtaaataggggtggacttccatttgatgaacggcaggaacctggcaaaagaattagtgaacttcaattttgcgatcgcgcgtgaatcacatactgtgccagtctcctcgagcaaagtctcaatctcacgtttactgaagttcgaaacaccaatggccttgatcttgccagtcttgaccacttcctccattgccctccatgtttgcacaaagtttgtctcgcccgggatcatcctgccttcagcgtcccgacggaaccgattggggccgcgcttgaaggtgcagggatagtgcatcaacaggaggtccacgtatggggtgtccaggtcacgcaaggagtcatccacagcgcgctccacgtcgtcggggtggtagtcattacaccacagctttgtgccgatgaaaatgtcttcgcggggaataccgctcttcttgattccctttccaacttgctcttcaacgttgtagacacgggctgtatcgatcagtcgcatgcccttccgcaacgctaggctgacagagccttcctgagaatccgggtcttggaatgtaccgaaccctaacgcggggatcttcgcagcggtgttgagggtgtaggaagttgcgcgggtggcgatgctgcgtgcgccaaacatgggcagagctaagcggaaagtctttccaaacaccgcagctcgggccattctggtcgaaacaaaagaattcattgttcaagaatctgattgtgtactgattcttggagttaccgagatgagtttgtcggctgacttggtttcaacaagaggggaattggtaagttagtccgtgtcttgggacgagtgacatagtaagcagtccttaccaggaccatgatatttccgtgaggtttaaatgtaccgcgtcaaaaaggggagaacccaatcccgaacggaccgcacgacctccaagtggggaaagatgggcgctggcaagggtcccgtgtcggcggccttggagacgaacccgagacgggggctcagcgcatcccgaagactgatatcggctagtgcttttcccgaagacacatccaggttcaaattagacggcctgcgtcctcgtctcgctgttcctacatcattcccaagatggtcggaaagtggctggtgcatcacgacccagagcactacgcgcatgagaactacggcaaatgtgcagagcacctcctcagcggtgcaccatttgagaacacaaacgccgtccctggctataagtacaagccgtggactgtccaggagcccctggacgcttcagagactggaaggcctgttcaagatgaaggcgactggtcctaaataggaagtgggtttctcacagtgagtcacctatatgctataatcgtgttcaacccgattctaaatgatttctgttctataattctctttcatatggaatctgatacatacgaccatagggtgtggaaaatagggcttcccgtccgctcagccgtactcaagccacacgccggtgagttagtagttgggtgggtgaccaccagcgaatcctcactgttgtatgtttttatttgatttttattcttttatcttatacttgccaacttataactaactagttaactataacaatattaaactcggctttgacttcatattgatatatataggatacgtttgtcgctatatagactaagcatttgcctacttaggtagttagtctcgtttatccttcccggaagctttatatatagcctcctttctatggatatattatcacgcttttttccctcctttatctccctagtagtatatagccttagtatttcactacctgaatagctgtacgtactctattactctatcctacgtgagcactaccacatacgaccatagggtgtggaaaacagggcttcccgtccgctcagccgtacttaagccacacgccggtgagttagtagttgggtgggtgaccaccagcgaatcctcactgttgtatgttttttttgtttttgtttgcatttctcagcggcactctggggtgagtgtgggtgatatgggtgagaagtcttgagactggggtgagagaggtgtgaacggcgtgacaatcctcacccttgaggtgatgtatttgcctccttattcgcctggcttgaaccccatcgagtaatttttctccgaactcaaatcttttattcggaggtactggggatactaccaagacaatcccgaacagggctttcatatttttctggggtggtgtgttgaacgagttcgagcaagagcaaagtgcgaggggacacttcaggaatgccggtgtccacgtcgatgaacagtgaaacttgaggaagactcccctccccttcagtttatttagttgtcttgcggatcaaaataaacaggaatagacatgaacaattgatctaacagactagatcattcatcaagaacaaccacccccagccgccgagcagccgtattcatgtctacgacccgggaaacgatcgtatcatcagatgaagcgtccggatcctcagactcgtccgagtccgtcatgtagaagtacaccccagcctccgagacaaactttgcacggtcaagaacaaccgtgaacatgcgaaatccgctaccgtcgtgtgccccctgtgagattttaatatattggtcgggtccttgaggagtaaaacgttttgctgctaggggttgactatcgcctgttgtgatattgtgtagggcgccaatagaaaagggattttctcggttctcttcattttgctgggatagaatctcaagaacttcgttctgggcgggcctgatggccgaccaggaattgcactttggaatgaagaatttgagagtgagagttttgttggccgggaggttggagaacattgacgccgtaaagaggcgcgctgtactttctaagatagaggaaccttctgcgtcgcgtatgtggctgagaaaggccgcatggacaatgtattgaatatcaggggtttcgcccttaggggtattagtgactgtcacgatgttggcttcctgagaaatatagaatgccggatcaagagagaagccgccaactgaggtttcgtggcctagctggtcacgaatctgttcttctgtcggtatatcctggcaaggaggctcgccctcatcaatacctaaggcgtctcgctccggatagcgagggacattattgaagatatcgagaatcattaactggcctatatagatctggtctataaggcgctcaataacgaattcaaatgcctctgaagggagtttctcttggccctcacgcaaatgctgcgccacgtcagccttagtgcacgtgctagaaaatgtacgattgaaatagagaaagtctgggccttcgcctatctcctcagcctcctccgagtcctgcatattgcccactcgataactatgcgaccgcagtaggacacaaaatccaacattcgaggatgaatatagacgattgaatcttggaatcagtgggaggggattctcgacccctgactgatgttgctgcttgcgacgggcgatttcaatgcgattatgctcaatacaggcaaagccatcgggcgggcggtatgaataaatctcgaacaaaggcttgacttcatcattccagaacatctgcatggggtagtctcggagctcgtggtggtcgtcgtccaggggaacaaggctgtagacctgaaaagcaactagttcactgggctctggctcgtattctgggtttacgtactgctcgagcacgacaggatgacccagatggtcagggtaagtgcgcacttgtttccaagacctagacatggcgactggtctttggggggtaaataacagctacccgattgtggcttaacctgctggggccagggaacgacgggcttaaatggacctggaggggagaggggttatataagcagggagaagatcgacagttaggactaatcgaccaacgtagactggagtatcaaaatgcaagttacagcttgaactaggtacttctcgggtggtctcatctctaaccacttctcatccaactttatatacatccaaatataccaaatctactacaggccagctttcctaggttattacctccccacattccgtacttactttggtcatttgatgaacttgtcgcagtgccaggtagcgggttacctgggtttgacatgcggaacacgaatttttctactgctgcatcgccagtagttcgccagtagtcatggtgatgtctgcgaattccttcgcgacgtcgtctatcttgccctgggcatccttcatggtactcatcctgtccttagcggtcttgtgccaatccgactgaatctgttcaaccttggccatgtggttgtcaatccagtaggcccatagggtacgcaaaccccagtgcttgaggccacgggggatatcgcctttcttgaggggctttccttttggttggttctgggcattatatagataccaagctaccaagctcgtgcaagtcttcttcacacgtgaacttgtcgctcgcctcagttcctctactggcgtgatcattaatctcgtcaaccctggtctatgcacctccaacctagagcgcaacagcgacaaagctcccgtggtgctacgccttgtacggcgcatcttggatcgcactaccgaggtcggcagccgcaccttcgttcttggcgcagagcgatggggtgagccaggatgtggaagcgcgggtctataccgaggtcggacagcgggcacagaagaaggtgtttgagcggacgctgcagattctggaggcgaggaagtcgggaattgtaaggtaggacttcaaactccctcctttctataattctctcccacagatcgactaatacatacgaccatagggtgtggaaaacagggcttcccgtccgctcagccgtacttaagccacacgccggtgagttagtagttgggtgggtgaccaccagcgaatcctcactgttgtatgtttttgtttttgctttgtttttcgcactgctctccttcgccagttcacgcactgtctgcactagggtggtgagcggatgatgagtgaaaactctggatcgggcggacaattttacatctccccaactacaaatgtgtgtcttcatgctctatgcgaccgaattttcagtttaatctaaaacatacaaccataggatgtgggaaacatgatagaatttgcagatcccggacttcgtggctccggatgccctttgatagtcgtgcccgcggaccccgcagattccaaaagctctggttatcaatccagccatgaagcctatcctcacgtccttgatccctcacacaatctccagcttagatttaccggcctttttgctcgaagcgagagcagccgacaacccaaactgagatgcaaccccgttgatgcggtgggttgagttcaagttcttcaccacgaggatttgataacaagtggcgctgccttggcgagaagcgatgacagaccaggcgaggaagagctcccaaatctgtttgatgttaaaacctatcaggcttagcacataagatgagactcaccctaaaccaccgttggccatacttggccttgatagtgtcggcatttccaagccaattgcggtaccatctccatagagttccagaataatgcaccccaacggtatcgatactgacgttgtaccatagtcagtcccgtcaaaggcagtgtgtgatatccttttagaactcaccttttgatctcaaacccggcccgttccaagcacatcgtatagtaccaaagaggagtagacgcatcggcgccacggaagatgtacttgttcaaaaacagcccccaaatcaaatcctcatactgccatgtttggcgaagaccggaaagctgcacgtacatggcaccatcatctttcagcatgtcatagcattggcggaagaaggtggtgagctttcgaataccgacatgctcacccatttcgagctgcgtgattttatcgtactgggcacgagggatgtcgcggtaatccatacacagaatacggctttgcgcttcggtaattccagccctttggagggcatcgttaccccatgccgtctggtggcgcgcaatggtgagaccggttaccttcgctccataattgagacttgcgaatttcgccagagtcccccatccacagccgatgtctaacatagtctcgtcttgcttaaggccgagcttttcacagacaatcgccatcttgttatcctgcatttcctctagtgtttcctcttttgacgtgtcggagatgataccggaggtgtagatcatgcgagggccaaggaaccaagcatagtggtcgttaccacgatcgtagtttggacggatctgctgatcgtcttggtctttcgtgtgaagcaacacatcgcgagcaaaggtcaggaaaatgtacttgaatagatcccaggtgaagccgaagtgcgcccaatcatggcgatattccaagatgtcgagagtatctccgttaaagtcgaccacaccatcgagatacatttcacagaaagtctgcatagggacacgtttcttgccgtgccatttggcacggtctgcctcgtttttgaactttaaatactgttctatcggtcgccccggcaatttgcctttgtcggtcatgcgagaactgcaggaggatgtccatgtccagtaccccaccaggattggcacagtcgtgattagaccaagaaatatagttgtcttcataccgccgccaagtagataagcaaggacggccgggacgcccaccagaagaccgattaggagggaattagagaatccctggttaccagcaccatcaactggaagaggcgcattgtggatggccgccgacttgaatcagttagcaatcggtcacatagtaataattgggagactgacatctgtgaggggtattccacaatcctcaggcgtttcgaatttcgagggtttggctggtggtgtttgaatgaaatcaatgtcgctgttgagatcaggggacgacatagcggctgcaggcagacttttctctgcagaatcccctctaaaaggcgagcgaaaagtcaagaatgcaacttgaggggagacgcgacaacattaacggacactcctgccgtgtctcggctcaagtcgacggggcccgcgggtcccgagctccattatgacggagggatttgcaaggggattccactgaattggccaataagatgttaagatgttaagatattccaattatagatattgtctgactgggatacaaaaatacgcgtaggagttcccaaggatgagattgccgagaatttctaagcactttcatgtaaatatagacccgattacatcgaggtcttgttctttaatccggtagaaaatttaccctgcaatctgtcacttgaagcctttgtgaggtgacagtgaggtttctgaacattccaggtacttgcacgccgatgaaacggatctatcaatgtatatattccatgtaaccaaactgtccgccgcaacactccgacctagccctgcaaccatcatatgaaggtgcacagtcgcaccctgcctcattcccttcagtatacgtactcaaaattcgggttttgtgcatcagtcaaatcagcgaaggccgtagaatcggccatgagctcgtcctcaccccctctctcccgcaattcatcgcgcgtcttctcctttcgtcggttctcccaaataaaggcatagcgaagcacaaagaaaagggcgagctcaaggcagttggcaaccagcagagagccaattcccagggggtatcccggcgcttgctcagatttgtaaaagaaggggccagcaatgttgccgacgcatgctccaaaccagatcataccggatacgatcattttcttggactgtccaccagtgttggaggtaataagggaaagggatatcacgaaggaggcttgatatgacccggtgagatagctaaattttgggggaacaattagtcacttcttaatcgtcacaagcaccagttagatctacttacaagcagatcagtcggccgacgtatgcattgtcgggggcaagcaagaaaccgagggcacccgcaatagtcgggaccatgaatagtgcgcagaccagggtacggctattcttcggcatgtgttcgttcgcatatcctccgagcacaatccaaataaccacgattactccttgaggtataccaagcagtgtcgtattgagtgtatcgaacccgaggccttgaatgaccaaagtggagaagttggatatcccaccgtttggaatgttagcaagaaaacccaggatagtaaataaccaagtcttataatcgagatacgcttctttgacttgttcccatttaattttctgtccctcaataccggtctgattagatcgcagtcgcgcaatcatcatgagcttctcatcacgattgaagccccaaaacgttgctggcgagttaggcaacagtagagccagcgcaattccccaggcggaacaaacagcaccaatgatgagaaactcgtagcgccaggattgaagagcaccttttatattgccgattccatagcctaaacccgacaataagtgactgctactcaatttggtaaactccgaatgaaaacataccaataagaccgccgccggcaacaccgatgccattccataaatagtatgcggagatacgccaaggctgctcggcacgggtatagtatgtggagacgacgaccataaacgctgggtcggcaatcgcctcaaacgcgccagaaaggactcgaagtgccgcaagcgcgtcgaagttctgcgatgcagcctggcacatgagaagcacgccccacatgaagatgttgaaggcgagataccaagccatccggcggctccgttgcatgagtaggttagacgggattgcccaaactaaccatccaaaatagaagatacttgataaccacgagtattctgtcccgactaggttgaggtcttctttgataccgaagattgctgcgtaagaaagtgtcgtcttgtcgacatactattagagacagacggtgttagctgtggcctaaaagagcgaaattgacatgaccagcatacataaaagaagtagcatattccaagaagtggaatgaggtgtatgtcaagcttgcgcttcaacctcttttctgcgtctttatcgatggcctcatcattaggatatctttgaattgcttcaagatatagttcactatcttctccttggttgattttgcctgccaccgataccttgaggttctcctctatatgctggacgtcatatacgctctgcggctccactacctctgggagggtttctttcttgccctccatgctgaagtgcagagtttctcactcaagattgatattcacttgtgtaaccagtggaatgggtattgaagaataattgtttagcagtatcaataaataggataaccaccacaatatagagtccccgcgtggaaagctggtgaccagcagtcgaagtcgggcacaatcacaattggtggaataaaagttgcggggaaaattcgatcagcgcaggatcgggaccaagtcctggagagactctgcttgactgtatagttgttccctgcgaagaactacccccgtatgtagcataaagtgattcgacggattgcatgtttgaccaattcatcgtgcttatgctgatcatgggaaataatcgtcattatgaaagaaaacaggggaagacaaaaaattcagtagggctccaagctgtcggacaatctccgagacctgatgccgaaaatgttacactaccagagccgacgatgtcattcctaggtcgacctccgtggcttggggacatattagaattgtgtgtccactgggatattcaaagatatcagaataggagcatgttttcgataagtagatgtgtagcactccgtacctggcgttggattcctatcggccacaactatgagatcttgtttccgtgtctggggttagaatccccgcagtttctggttatgggtcggcgcatatttgtgtgggggagttgcatgggagcgtgggggaattgcattgcagcgtggggggaagaagggaggggggcgggaattccccaggggccattccagattatttcgtatgtactccgtacggagtaccgagcgatggtaatgaccgggaatagttgccgagcaatccctttctgcagccacaatatccacaatggatgtttccagcaattggtgacagagatcggcatatgaatcatctcggcttttggtgcctccaatagtcacataaactggcaccgacagtatcaaagtgtccacccattgcatccgcaaatagaccagatcgctaataaggtaaatgagcccagctgaccgaagaaggaagttgcctttcatccttggcgtacggcagttttgcaagcataaagttagttagccagccactacccctggagccgaagccccgtcttccccggggtcttcgccaagaacccaaagcccattacccaacatcccggggctggctttcttggcgaagactgggcagaggctgaactcgtccagtctttcgaactcttgaaatggtaactggatatcagacgaagagggcggagggcagagaattgggttcgctctccttgaatctatgggacgtgcttcttcagttgcacaggaagtgtcacctcttgcatcgagtattcagcccgagtagacagcccgatccaggttcacaagatgcgttcctttcttctgtgagatcaactttccagactccatttgtttgggattcctaggacctcctagtctgagaccagacctcctttttgttgcttgtttgtcttcgcggttgggccacgtgacactgtcggtgttgttgcctgatttgtcaggccaaacaacgcactgcacgtgacaagcgtttttgtgagaatgtgaagtttttctctcgtcagtctcttcttgatagacagacctgataacctagaaacaatctatgatctgtcttgggcatttatttagggagcacccctagtaggtatatatacggtcggggatagagtcgagatcccgcattgtatgcatccagccaagtgccatgcctggaatagagttataaaatagaggtttgacaaggcttagcaatattcagcgactattagagagtgcgcatgtataataattaaactaatatcattttcagtacaacttccggtcgaatgtcggtatataaccaccagtgatcatcgtcagtttcttcaccctcttcttgtttcttactcttctgcaattgcaatagaaaacacgtgcatctatttttaatctcaaagaaattatgccctggtgttattccaatcattagcagttcataaataagcaatcacatgaattaaacatctcttatgcgatcaactgtctccccccgaaaaccaaccgatccattctgtttctacacgtgcacactaaaccagctcggccaatatatttcctccgacatctcaaccacccgtcgccgaaagttggttcatctccgaattttcgctctctgttgtttgtacactaatcctaaaacacggtagtgaatctttatgccaaatgacagtcgtggattaaggtaacaatgcatgagaccgatctgcagaccgagcgacgtgccttgcatttcgggcatgattggctctgattgcattttcatggtgcggatcttttttatgcttacggtacctgcgccgaggaaaggaattatatatagaggtgaatcatggagcctccgtgacatatgtgattctgtgaattaattaccttatttgatcatggggggaatttcgtctctcaaattgctgccctttgtggctggttgcgcctttgctggttatcaatatcctgaggtcccaaaggacttgactacaccattccagcagcgattgtcagtctatggacctgatggtatgaactctgctagagatagtgaacctgagtgaggactaacttgttcgtctctagctgtgtctgttggttggaacacctatatgcaactcgagcagagttgcgtacattatggcttgtcagaaagcaacctgaacaccaaagcttgctcatcctcgtcgaccacctacgacccctcccggacgtggtccaatgtcgccgtcctaacaggcctgaccccagcgacaacctactactataagatcgactccaccaactcgaccgttggccatttccttagccctcgtacacctggtgataaaactgccttcagtatggacgtggtcattgatctgggtgtctacggcaaggacggctacacaagcaaaagcgccaaaaaggactccatcccagtcgtcgagccagaactaaaccataccacaatcggtcgcctcgcgaaatcagtagacgactatgagctcatcatccacccaggagacttcgcttacgccgatgattggtatctcaaattctcaaacctgtttgagggcaaagaagcctacgagtccattatcgaacagttctacgaccaactcgcaccaatcgcaggccgcaagctttacatggccagcccgggaaaccacgaagcagactgctctgagattccatacttgaacaacctctgccccaagggccaaaacaacttcaccgagttcatgcaccgatacgagaaaaccatgccgcagtcttttgtttcctcgtcatccaacacgaacgcccaagccctggcccgaaaggcccgcagcctttcattgccacccttttggtattccttcgaatacggcatggcccacgtcgtaatgatcgacactgaaacagatttccctgacgcaccaagtgggccagatggttctgccaagcttaatggcgggccatttggcactgccacccagcagatcgacttcctcaaggctgatctcgcttccgtcgaccggagtgtcacaccctgggtaattgtcgccggacacagaccgtggtactcaactggtaaatcttcgaactcctgcggcccctgccaagaggcgtttgagggcctgttttaccagtatggcgttgacctcggtgtctttggccatgtgcacaattcgcagcggttcttgcctgttgttaatggtaccgccgaccccaacggtatgaaagatcccaaggctcccatgtatattgttgctgggggtgcgggtaatattgaggggttgagctctgttggcagtcagcccgattatacggagtttgcgtatgatgaggactacagctacagtaccattaggtttttggacgagcagcatttgcaggtcgactttgtgaggtcttctactggagagatcttggattctagtactttgtataaggaacatgcgacggattttgtggagcagtgatggaagttcgggtagtatgggctgcttgtgcgcatcaaaataataataatttatcactcgatccacttgtagtcgccaagtctgtggataatgcctcaatgccgcaaagtcatgaagtataatgacgacattgctttagatatttatatagatttttcgacctcgagacttccttggccgcgcaggtttttcaacttttcagaccatcaagatatcagcagaccacataagtgagaagatggaaactatttacctgatattagagaaggcgattttgtggtctggtgatgctgagtctctacaagactttagatcctggagcaccgaatttgatggatatcccgcaacagaattgatgtccagcctcttggagtacgattcaaagcttcaacgcataactcaacttgaggaatacctccttgaacaggtccaagctttggaagggaaagacgttacatcgcaggaacacgaaaggttacaagttctccaaccacaattagaagacctaagaaaaagctattgcaaattcgaacatggccggttggaactcaagggacgattaaaaggccctgttctacgaggttttattgagtgtcgatcaaatcaaagatggtatcttagtgatacactccgtcgaagttgtgcagaacggggaggttgctgtggccgtgaatgtcagtgctgtgaaaaccggagcacacatatgaatcctgcacggaaattaggagttggtcattgtactcttgactgtggatgttgctctaaagcccgagggttcgatttcacgtcgaaggagaaagaagagctctatgccaagcatcgtcgcctgggtcgctgtcttgactgccttctgtgcgttcgaatggtatcagcatcgttttgggggtctgaatatgaagattttcgcttgctgaggaaatggaaatggtggctaagcaagagaattgcgttcatgggctttacaatattgttgccttactacatcggaagatattctacttcacaaatgtgagctaggagagatggtcagagaagggaaaacgatcataaagcttttttcgcttcataataggaaattacaccttttgctacgtgggctaagtatttatgtgagtaatattttaggcgggtgaatagagagccgcccacgctccctaaacgtgagcgctgggtggccaccacgttaaacatccacgggtgctattgtacgcttttacggaagtttatactaagtcttgaggctgccgataccgcgtactatagctgagaataccttagaagtggtgtggatacccagttttgtagaggtaaaaaagaaaaaagaaagacagtgcccacctctgcaagaaaactaacacgaaagagaaggagaaccctcatcaaagccagacttttcagatactatccaatatccaaggattcatcccataatttatttatatactccttggcccatataacccttagtgctcaaaaggtctaacgcaactaattataaaatgtacatggctgtcatcgttgagacagccgactattccactccttcgggggggttgtcgagctacccaccccagacccttcctggaatgtccatggctcactctgcacaacagtctctgaaaccacagtaatatccttcgacgacggttcgttctgagcgaggatatgctcatcgctgccccatgcggaagtctgcatatgcgtcggcgcagccgtgtttgtcttgctcttcttggtatcgccttcgccgcgatttgtaaaggacttcaaacctcggctggagagctggtatggctgtcctgatgttttccccgaggaactgaagacgtgggtgagaccgatcttcctgaaacctttgcggataagtggttggatgatcggcaggttggagacaacgattgagacaaaagtctctcgacaggcccatttcgagccagcctcagcaccatcggggctgttctgtagtgtatgtgtcagatacgcagcacgtaataggcgcgtgtttctgtgtaggtatattattgttgcatgggacgtaccttcataatcgtggcagctcggataattcccgctatcatgacgaatgtagcgccggaaaagagaaccatgagaggaatctttcgttttaggttgaggttgacagtccagagtaggggaagcgggattgagagaaggtacatgtccgtgacaatgttgagtaccacagagacgaaaacataaatccgggaatgggttggttgacagaaatctgcgcagatatagtaagataataagactattataactgatgattgcataactcactgccagggtcagggttaatctgccaaaacgcatggaagggctggcatgatagcaggagggacaacgctgttgcgagataagtcacacctaaaataatatatgccacccgaactcgggtggggaggtgctggaggccagtcctgtgagatatttagcattgtttcattatatccaaggtggtatgtgaagcgcacgtcaatcgagagtagaagactgccaggctgaatttgactagccagagaatagccacgtataacgaccatccaaggacctggatctttgatccagcaacacgattggaccactcagtcgaattggggtcgagacttgctcgttgctcaggcgtcatgtagctgttagtcaggccctggaatttggcaccgacaaggtacgccgctactgtttccagtacaaagaagatctgtcaaagagcatcatgttaattctacctttttccgaaggcaggacaggcgaaataacgtactcccgccaatggcatgagataatcatcaagttgaaaattggccggcccaacgagcttccatcgtaccccaatacgcactataattgtaaccagagccaaggacaacagagtccacgcctccacgttagcgggcattcttgcaagtgctcgatagtcagcaaagtagaggatgaaacaacggaagataagggcgggagttagagggcattaaaaagaaaggctccagccagaccggcccactgggaacgcctaggacatagagatttaccatgtactccgttctccgtcatgttatacggatagccgactagtttgtcaggccaattacctattgcgaatcatcagcccctggaagatcatccatgtcaatttgcgtcaggtccacccgctccacccgctccaccaccttcgccccgcccaggaggagcacatccctgtaattggtgcgggtccggcgatccgtgtgcccgacacgggaagcatacccagacccacgggtcatatttcgcaacacgttggaaagaaaccgttacagatgtggggatgtggtacgagccaacttactattggccaattcatggagcagcttgttcaacacgttatacggcttcaaaatttccttaaattagcatattgggagtagagaccctccccctattgctttctccgctgttctccggtcgaaatatttatacttcctttcctcccaataactaattttggactcaaaattctttatttatttatccgtgctcgtatttttggtggctttcaaggttcactcctatccgacatccacacctctcaccaagtcgttccccgcgcgatgtcgacttttgactttatcattgtagggagtgagtgatcttcattcggccttgatttcgctggccccctatccctaacgcatctcgcaggtgggccgtctggctgcgccctcgccgctggccttgccaattcgaccgcaaaaccccgcgtcctcctccttgaagcaggcgacaacaaggaagatcgcaaccttcgcgtcgacggccagagatggctcaccttccaggaccagtcaatgaactggggattcaagactactccgcagacggactgcaacaaccgtgagatcgattacagtcgcggccggtgcatgggcgggtcgagttccatcaatttcggtgtgtacagtgtcggtgcccgcgatgactaccaggagtgggcgagaattgtgggcgatgagactttcgcgtgggaaggtgtacagaaaaagtttaaggctctggagacattccatggcgaaattccggagggcatagatagaaagtacgcggatcccaagatggagaaccacggaagtgagggaccgttacatgtggggtttgcgcgggagtgggagcgggatttaacagacctactggacgtcttcgagcaggctgggtttccatcgaacccagatcacaactcgggaaatccgattggaatgtcggttctgatcagctcggcgcacaaagggttgcgttcgacagccggggacctggttaaggagaagctggataatttgactattgtcactggggcccctgtgcagcgtgtcctcctggaggggaaaaaggctgttggggttgagtcgaacgggaataaatgtgaggacgagacctatccctgctgcgagttacccagacactaacagcggtgaacagactacgccacaaaggaagtcgtcctatcagctggctcactaaacgaccctcgcattctgatgcactcgggcatcggccctgccgaccaactccagcaatacgaagtccccgtcgtccacgatgtacccgccattggccagggcctccgtgaccactgcttcgtgccgatggtaaacactcgcacagaaaccagcacggaccgaaaagccttttatggcgacaaagccgctatggaagccgcgcagaagcagtgggaagaagacgggacaggcccttgggcgaaatttgcctgcgagttgggcatcggctggttcaagctgaccgagcagctcacttcctcgccagaattcaaagccctcccagcagacgaacagaagtatcttctacaggagaccgtgccgcactacgagatcctcacccatttccccgttcactgggttatcccggatttcccgaacgaggcgttaaactactcctgtctcctcgtcttcttgttcaacgcccagactcgtggagaagtcacactgcagtcctcagatcctgactgtccgctctctttcaaccctaagttcctggcccacccctttgaccgccgactcgcgatagaggccttgcgtgactcattccgtgtcgcgaagcacgattcctacacaaaggacaacgtggccgagctggcaatgcctaagggcgagtcagacgaggacctgctcgagtactggcggcagaacatctcgtcgagctggcacatgacagggacggtgaagatgggtaggacaggcgatgtgcacgcggttgttgatccggatttcaagttgacaggtattgagaacctgcgtgtggcggatatgtcggttgtgccggtgttagtgaatgcccatgtccaggctgttgcgtatgtcaccggtgcaatttgtgcggagaagttggtgaaggagtatagcctttcttagatatagcacctactagtgttggtagaccctaatacatgttcccaatggaaattgtacttgcatcgcggccctagggaattaacataattttgctcgaccgtctgaataatgaatgcacaggaaaatacaagtgcgcacacacatatatatcatatgtacactgtataataagacaaagtctcgttattagagcaggtgttttggtgttcatagggaatttacgagactatcagaagatcgatcaggatgttgaccaaggactttattcacagtatgtgtcaaaccctaccccactgccactagtagtcccggaaggtgcagagttttaaaatttgtgggaagacaaccttgaataatggggtttgtccgttccgagggtcacaaccttggaaggtttccgaggtttgttatcaagtggagattttccgacgtttcgtatctatcaactttacctgggtaggaattataattattagccctatttttgtaatatatacctaggtagtgggggcaggataaatacgtactagactataccacctgctaactacatatgtgcattgatacatatactatcaccaattgggtaattggtaggaagtttacaggtttaccaaagcgtaagaaaaaggagatagggatttttttgattcaagtgtccacacgcagagtgatagctagcagagctgccgacaggaagtgttccactgacagtgaaactagtccaaactaaattgtcggtggcaacccgtgaagatcggcgttctaaagcgtacatatgtataactacttacggagtacataactagtacttttttgatttacctcggctaactatttgcaagtgtaaattaccttagtgggagaatactatttattacactactcaggtatccccgtgtctaccaagatagacatgaactactccgtgctccgaattgattgtattagtaacctttcggcatccaggaaataccaagttacctaggcacttagttcagaacccaggttaaacaggcttttcatctcttcgattccatcactttaccccccatatcagagcaattgattgcttgtttattgttaactcagactacagaagttcataagtttcattggccgtttctttagacgcgtgtgcatggacgagtttcgacaaggcttagtctgacattgatgagtacccatgtacgtcgaagtacacggttctcaaagttaaatattgttgggatgcgtataaatgtagtttacatacggagtacggagtatatacaacatacctaactactccgtaggtagttagcttttacccaagtcagtcaatccactttaaaactcaaaactcaaccctattgttctctctctctccctctttctctgttgtctgtcggaggatgcgtaggatcgctatatttcatctatcgtatgtggtaggggagagtggaccctttgtgccgttccatcgattttgtccgcccatggagccgtgtgcttaaccggtcacatgatcctagtcggccacgtgactactacctatcacatgaccgcgcgcatagtaattctcacgctaacccaacctcggaagtcttaagcgattacataagatcattttaccaaccttggaaccttggaaaagatctggaatcgcaatatgcgattgtggctgcagcgatatacatactagaccctagccactgcttaggaccataagtagactctttcttgtatctttctttcctttcctatcactctatagcttccgcatcatattttgctttcatgctttatgatctcattggcaagctcatatattcaaacattaactgctctgggtcacgtaggctatgaaccgccccaaggggtttagcggctgggtccctcctcaggtgtcccactccagacgattctattcatctatacttcataccttggaaggataattgaaatgaccaagcggctgtatcccacaccgttcgcctttctgctcgactctctctattggagtagccccacggcggacccgaatccccggccgtctccggccatcgaccatacatacatccggggtttgttttctttttctacccgtatctcgtgcgtctttggtgatgcagtgtccacctcaacatcaagcccagaagcaccaacccacaccggcagccaagcagtgggttaagactagatgctttcgctcgagggttatgactattgagaggttcgtagcgctgttatagtgctgtcacagcacctcaatctcgaataatgcacctgggcatagcttggggatgactagccggccacagcttccaaataaaaagaccaaaacccagaccggtcccaaagcaatgtcaagttctctccttggcgggccacagttcagcagagagccaaggcgatccgtcagagggacctcgtccatttgaattatagagtatcccgccatctgcagtcccgagtgtcgatttctccgactctgtaattctatttgtcggtggtcaaaaaaagccaactcaatacatgaacaatccttcgtatttaggaaatcccggatcaatcctcaatgatcggaaataagccagtcggaataaatagcgaagcaacactatatcggaccatctcgatatatatcctactccagggtggagaaatgaataatagcgagccaattaggtttttattcaaccctaatctggtcacggaactattcattcaacatctacgggaatgggagggaaagaatcgggaccccggacagattaacccaactgtgctaggacttaactggtcccactcggtcttaggctgacatcaaatctgcagtgaaagtgtggggtgatccaggaactacatccattttgggaaaccatagccactgcttccccagattggtggggtccatgatgatctatgactacaacggggtgagagactatggggaagtttgtgatggagatggaatccagagtataaaggcttcggtgagtgaagggagatgtttctttctatcaatcgcttctgtcctgcatactgaattgtatgctctctctctcccttttttcaattcagccggactacctcatacccctacaatgcattggtcgacctcggttccgctgctctgcagctcaatgcttaccttcctcacggggtcacttgcgctagagcgggcggataagcactatgctgtcatggacaatgattggtataccgtgggcttcgtaccttatttggttgctcttgatggcgatgtggaaatcctaggcttggcctcaggtgggtatctatagcgtactgcatcggcgcaattgttcactaatcgaaatttttagataccgccaacagctggcagccacagggcgcattgcacgcagtagcaaccctagaggccgggaatctcagctgtattccagtctacccgggcgccacatggccgctgataaacaccccgcaccgcttccatgcatgggagatgatccatggtaaactgccctggcaaggcgctttcgcgcccgagaataagactctggaggctgagggcaacgaccccacctctggcgatccgaaccgtatcgtcaaggaggctttcaaggaaggcttcccaaagggccgaccggaaaactccacctcagctgctaatttcatggtcgagatggtgcacaagtatcccggccaggtatccatttactcggcgggcgccttgaccaatgttgcgcttgctgtgcgtatggacccgcagtttgcgtcgcttgctaaggatctcgtgatcatgggtgggtatgtcgatctgaacatgctccaggccactggaagtatcatgctggcaaatcacggatcggacgttagtatcctttcaataaacccatgatttgtgttgactcctgacaatttagatcaatctcatgattgaccccgaagcttctaagatcgccctgaccgcggattttcctaatatcactatcgccggcaatgttgctaaccaggtcatgccgaccaaggagttcttggaagaggttcgctcggttccaaacccatacagcgagctcttctataagtattacgacctgtctttccccttctgggatgagacagctgccgctttgatggtcgacccttctatctctgtcaaccagacttcaggtatgtcatgtggaaggtagattcaaagtgtcatggcttgcggctaactttttttcaagtatatctggacgtggacacatcgtatggcagccccaactatggaaacatccatgtgtaccagaaggcacttgcgcctcagggtatccgggaggtgaactatgtgttcgaggtggatgctgagagactcatcagccggatcaagcatgccctgcagtatcccaaatcgtgtgcggatttgcggtaggttgagtgtcctgccggattgggctggcttgtataatgactgaaataatgggtaaacaatgtatggtacggatcaatgatatgtaggcctctatgtagttaacgtgaccactaccgagctagtcaaccccacctactagatttaatatgcgttggtgccctaacctcaaggatccaaggctgcttcatcatcgcctaaggcaccatattgctatatcgacatagccacaggtactcggggggccgatcatggaacatccgcctaacgtctcatgagttggcggaaaggcgagtatcagtgctgcgcaggactgggttttgggcgtgctgtcactcgaggtctggtatgtgattatgggtgactcgccggtgcaatcaaatgtggaatcgtcccaggcgctatgatatgttgatattttggacagctagaatcccaatttaccaattcatctccctttccaatgttatagggtattttgcaaacaaagtttttgttttaggtctcattcgccctccaaggacaagagttatcgggtgctcttttcttgagcgactgaaatagtattcgatgaccatcaccattcacgggaatattcgcttggatgtctgatatgttgcgatgtcattggacgctaagccatcaacaggaaaaagcaagcatgcagccagctcactatttcactgtggccatatccttcacacccgctttcccccactttttgtaaaaatcctctcactatgcaaaactcatcggccccagccttgtacatcacgggactaggatctcaatatccgccctatctactaggagccaaggaccttgataacctcgcagcgcgcttttacgatgtgacccgtccagggtaagctggtcgacttgggttgctccgcaattgtttaattcttgctagaatcaaaaaattgcttcaggtcaaccgcacaacgggtatcgacaccagatctgcagttcgaccgtacaaggcatttgcgacgcagacggacccaccttcaatcagtgagattgaccaattcttccgtcaagcgggggtcgaccttgctgttcaagcatgtcaaaaggctctcatagaagcacatatcgctccccagcagatcacccatacgatcggggttacctgcaccaaccaaggtaacccggggtacgattttctcgtagcccgtaaattgaaccttccaccgcatgtcgatcgcatgcttctccacggcgttggatgtgcaggtgggctgtcaatattacgggccgcagcgcagatagccggcggagcaagtctgcgacggaagccagcccgcattttagcgtttgcttgtgagctgtgtacgcccaatgtgcgacattgtctgtccatggcagaacgcagtatggattctgatcaagcaaacattgcagcggctttgttctcagatgctgcggccgcctttgttctttgtaatgagcatgctatgactcaggacaagcaagttactccgcagtttgagctcctagaatggggctgtgatttggttccgggcaccgctgagtatatgacattttatgcaggtgtcgatggttcgtcaatgtcatttgctctttcaatgaacctagactaaccatccgcaccaaatttcggttgcatatatatataggttatcgagctaccctcagtcgacatattcccgaatacaccaaacatgcaatcagaccaatgtttgagagacttcttcccttatacgaggaacaattaaagtgtcaaccaagattaggagggcaactgctgagaccgctagggattcacgatttcgactgggccttgcatcctggagggaaagcaatcatagatggcgtagcagaagtcttgcaattgtctgaagatcaactccaggcaacttgggagatatatcgcacccgtggaaactcgtctagtgcttcggtcttgattgtcttggatcagctccgttcagagagtaaaaggacgcatattgttgctacctcgtttggtcccggtctggcaattgagatggcgctgctaagaaggtgtcaggtggatgataatctagagggttaatgccaatagacttgatgtctttgccctatatatcgtcatcttccattgccttatcatcaaaccctatataggattctgcagacgcctctttggaataggtctgaactgatgtcacctctgactgggcgggagacatggtttgtgcagcacggaataaatgcacaagcaatcccaccacctcctgatacttgccaaggcgagcactaacgatatgctcggaccattgttcaagttagaacatgtatgatttgatactaagcacgcgattgaattgcgcctagtggtcgtcggctatagtggttgggataaaggcccgtgtaggaacgataagctcggcgaagttttctgctataattacgttgtggatagcggcatttcgagaatcatatagcctaagctctgcctacatacggcgaacatactcctccaaacgattgatagcctataggccggtttcggcctgctcgcgatgagcaatcacgcgaatttctatggatgattgagaggagtggtttcgccggtgaccacgtgaagtttcgggaacaaggggcaatttaataagtagcggaagccgtagaaattcctaagttggaataatccagcagaatcctccttgatactccagatcgtcataagaagcacgtgggaggttaaccgaacggtcgcggagacctagcttggtctttttaggagatatagagcgagatctgctagtggggctttgaactggctgaggcaatctagagtgagaggaagttttgccttttgaggatgacttgttggcttgcttgccggctgccactgtgttatatgttaatcgtcagcttgccatcgtgaagcctcgttttatacaagttttaatgcactatgcacttactgatcccaggaacatcgtttgagtcgacgccagtcagcgtccgagagcgggtggcgcgcccgttccactgacagttgccacatgctgtgacaacacgatcgatgtcgtggtaacggacacactttgcccaaggtccatcattttggaggcagtttccgcattcttgttgtgatacttctcccgcaatctgaatcaagattgattcgacatttccagctttcctgccgatgcgttcgtccaggcgttttccggtgtagtgtgtcgtggacctctggagaggctccctcacagcagtggcttgcttcagtctggcaattgctcgtgtcttgagtttcctggcgttcctcgccaccttccatggcaccgtcatcgcatacacatttcgatgagtgcaaaggatacacgtattctttgcgcgtgtcagtgtgaacacaaatttgcagttctgtcgacctgcggcgctcggtgcatgggagcgtgtcgaaattgaggatcaaaggcgcgcctgtcaccgccccgttctgcaacgacgctctctgggtacattcaaggactgttgtcggacgatttcgcgttgaacagccagtgggctggttgaaccctcagtccaaacctcaaaatcaacgcggtacggattatcgcttgcgacgtcgatcaacacgttaagtttggtttctcggtttgtattagaataccaccaacgggcatcctgtcggagttggtccaaactttcagaagccccaacctcaagaacgagggagggatactctatggcggccgaatcgacacgggcgtcgtacggaccgaatgctcagtctggctccttgctagacataactccagggattcgctccgagccttggccggtaaaatctccgggcttccaattgtcgcttctcttctctggacatagataaaagcatgttttgactccatgacctggcttaccgcagtatgaacagcccagtgtcacttttctctggtttgtgagacaaccactttttgacatggttttcggcagatacacccttcggcggctcgttggtgcgccgcttctgactgttgtttaaatttttggaattagaagcgttggaagaagcgttggaagaagcgttggaagaagcgttggaagaagcgttggaagaagcgttggaagatccagacttttgattcctgatagcagagagagcgatagaatctgctttgctagtcttgatatagtctagaatagcgatactataccggtaaaaatcggcaatggtaatagtctgcaccgtcttgtcgatagcattcagctcattatccttcacgacaatgaagctgttcaattcctgcacttcttctagctgggaaagcatcatttgcaaagcatagtagggaggaatgtcgacataaaggtcgcaaatcgctttgtaagcaatatttagagcatcgatatactcttcgcttactgaaaattggcttcgggagagatcaaggaaggtgttcatagctgttttgatagctccgtgtccttctcccttcatataaatcttgatctccgcgaaaagctcatcggcgtagtaaggatcacttccgcgcgcatctgaccagaaaagctctccaccaccatccgaactccctccgatgcagagtagataccgaaatctactcctggaagcattttttattggccttgacaacactaaagcactagagacatgatatccgcgagcccttcattcttggaagctcatactcatgatgccggcttcgggtggcggagccctaacatgtccaatgagcttgggatggtgtattgcgacccaagtgcatagagaacctcatagattccaatgctagattgaacagaaatatatatatggaagcctataatcaattgtgctttggtgatatttccctcgacaaagagtccaggcttgtcccgctctcaacgtcatatctacatacattttataccaacacccatctacattgccacctccctctcccatacccctacctacatacgtccaatatgggtgttaagccccgaacagaccgccccgttgcagtcatcggcgccggtgtcctcggccgccgcatcggctgtgtcttcatcgctgctggctaccatgtccacatccgggatccctcgccggtggctctccgcgatgcagaggactacatcgataaacacaaagtcgagttctccttgatgccgcgcattcaaaagatgcgtgaagaagataacgagggcgaccctggcgatcccaagggtcagacctccatttcccaggttgacctcgagtcgtatacggccgcgccctacggcaactgcaagaccttcaccgagcttgagcccgctatttccaacgcttggcttattgtcgaggctgtgcctgagatactgcggttgaagattgacactttggcagacttggaaaagtacgctccggccgattgttacatcggctccaacagctcctctatcaagtcaaacttgatgcttgtcaaggtctccgacaagcgcaagcgtaagatcttcaatattcacttcacaatgcctcctgctatccgtacggtcgagctgatgacatgtggtgagaccgatcccgagatcttcccttacctggagactgtcttgggtgaatgtggcatgttgccagtgacagctcgccgcgaatcgaccgggtacgtattatcgcgaaagcgaaaaaagaataaaaaggaaaggaaacgtagtacatcagcacagcagactgactcaaagaactgtacagattcatcttcaaccgcatctgggcagcagtcaagcgggaaatcacccaaatcctctacgaaggcgtcagcgaccccggccaaattgacctactctgggaacacatgttcaagaatggccccctcccctgccaattgatggaccaagtcggcctcgataccgtcgccttcatcgaagaaaactacatccaagagaggggtctcccttctgccgcaatcgactggctacgcagggaatacctcgaccaaggacgtctcggcaagaagagtgaaaagggcggcctctacccgccactctcgaaatcctcttccgcagaagcacatccggcacacccgcacagcgccgcaaaagacatctacctgctggacgtcgggctcgggggaaacgccagggatgtgtcgcaggtgcactccaacggcaaaatcatccgcctcaatctcgcaacgcagaaactcacccccgtcgtcgtcggccagaatctgcctgacggtatcgacgtggcactagagacgcagcgcatcttctggacgaatatgggccgcagcacggcagcatgtgatggctccgtctggtcggctgatatggacggcggcgatgtgatgtgtgttgtcaccgttggccaggtgcatacacccaagcagatctcggttatcgagtcacgtaagcaggtttacttctgcgaccgtgagggtctaggtgtgcaccgctgtgattttgatggcagtaaccacgttgttctggtgcagcgccgtgcggagccgggcatgagtctgttggagcagatgaccctttggtgtgtgggtgttgctatcgatgccgagcgtggtctcttgtactggacccagaagggaccttgcaaggctggtcttggtcagatctactgcgctggcttgggtattcctgccggtgagactgctgagaatcggactgatatccggtgtctgtggagccacctgcccgagcccattgatactgagatagatagcgacactcggaccctgtactggacggaccgtggtgagcaccctttcggttgcacactgaatcgtgcctatgttggtggtgaagagatagactttgagaaggttattctggcacgtcacttccacgagcctattggcttgaagttggataaggcgaacaatattgtgtatgtggctgacctgggtggtagcttgtactcggtatcgttggaagatggactcaagactgagcttgtgcgcaacgatgtttgctacactggtttggctctcgtttagcgaaacatgtatgttgtatgttatatgtgaatatagaatagatatccttctgatctgtttcagtaacccccacgcaacatgggggtgaaaccaagctaagaaattaagaaatacatgaatacatacataatgacattataatagtacctaggtattctgtatgttgcatttcaaatgttatgcatgtatatgcatcatgtaacggtggtatggtgatctcgtagaattctgacgtggggaataatagagcagagtccccttaaccctaattaattgcatgtcttagttaagtcttcactagttaaacatgcaatatgcatagctgaaacagactaaatacaaaaacacaatctcaccctttctcccctcttccccctcgatccattcctgcacagccagggactgccgatcccccatttcccgtactcttcccatttacatctacatctactactctgtattctgtacacatatacaaccatctatcccacatcctaggtagaaacacatctaccaagatgcacctccataccctcctccccatcctctcggccttaggcacaacagcagccattacctccaagccagcccacctctgggccacccactacaatggcaatgtctactccttgaccctgaaggacaatgacctctccatatcgcaaaccctcaacacctgcggcgacatgccaagctggttaaccctagacgcgcacacccgcaccgtctactgctccgacgagaccggcactgccgatccttccacgcatggctcgctgacggccctgcatgtcaagccagatggcacgctgcgcgaaggcgctgtcgcgaagactgtcggtggcggcgtgaatagtgttatctatgagactgctgcggggaagaagtttattgcaattgcgcattagtatgtttttctgtttttctttttcttgcctacattcctaaggtcttggcttggcttgcttgccttgatgctgttgtggatatgggattgtactaacaacctaatagccaaggctcggccatctcaaccttcgccttgcccatcaaacaaaaccaaccaagcctgcaagccttccatttcaacttgaccagaccgggtaaagtcgaccagcaggactcgccacacccacacgaagtcttcctcgacccgaccggctcgttcattgtcagtccggacctgggtgcggacctgctgcgcgtgtacgcgatcgaggatggcccgtcgggtaagctgtccgagtgtccgagtgtgaacattacctacggcagcgggccgcgacacggcctgttctgggcagataacaccgaccggtcggttgatgggtcgacgaattcgcggcagacggcggctgtcggcgagacaatgttgtacctccttaatgagatcgggggtacaatgatggcgtttgacgtttcgtatccgagatctgggtgtttgtcttttgagaagacgcaaaccctggtgccgtaccccgacggtgttatgcccgacggtgccacgccggctgagattagtaggattggagatcagttttatgtttcaatccgaagtgatcagggtttcgagccgagtgattcgatgattgtgcttgatcggtcgccagtggacggatcagtgaagttgcgggactcggcttctgcatttggaaaggtgccgcggacctttgtgatcaatcgggctggggatctggttgctattgggaaccaggcttctgcgacggtttccattgtgcgtcgggatccgaagaccggagatctcggtgaggagattgctgctctacaggttggtgagcccggaaaggtagggactgcggagggtctcagcagtgtcatctgggatgagtagattggtagttatataaatcaagaattggatggcgtgggagaacacggttgtctcccacgaccacagctctcttctataaacagcgcagaatgaaaccattgcagtacaggctcgcatcacatgaaagacttgaaagagcatcaaaaagcatatacctcatgaccaaaagatatgtccacatgaaccccagaatgcggaaagaaagaaaatgtagacctttgaatgttgaagaccagcttcttcgggtttttgactgtcggaaacctgcaccgaaaagacctggcctggaaaaaggaactcctgcaacgtcgtccgcacgatgaatcctgccatatcgtagtgaaaaataaaaaagaagaccaggaaagccgaccgaacgatgaagaataaataacaatatgagaatgagtgtatcaaacatcagtcgtaaaatgcgtaaagccaaatatgtaggcggtcttgaagtcgtttcacttgatgtcgatttggaatgccttccatttgcctccaactgttcgacatcgtggacacccttgaggaccagggtaacttgttggtccttgtgacaggacggtatttaacgacccgttccctggggttcggaatgaagtaggcggacttgaaatgaacatgctcacgcagtcgcggcagactccacagatgcactccgtacaggcatagcactcattcagtgccgaaggtcgtttgcactgagcacaaaacacctgaacctctttgttgcggaaagacgctggagtaggattggagaatcggtggtgctggcgctgcgagatgggcgggataagattcataactgggctggaatcagagtttatggacggcgcgactcccgaaaccgatgacgcaaaatttctgccggatgccgaagacatggaatcgagcgatgattcaatagacgggaatggttccaagtcgctctcacggctgcggtggttctcgtatggtggtggggtcaatgacttgtgcaaaggcgaggcggcgtatgaatgaggtgggaatggccgatgtgaagagataggaggcaatcccgaggattggaaagcgggtggtagcgaggaccgatttttcaccccagagggggcagacgtcacgttggaaagtagtggggcaatcgttggagaccgaccagcctgtatatggcgcatcagcagtggaaagaaaagtccagaattgcattcaaactcacctctgaatacggctcatcgtctacttcggttgctgatgtcgcggcttcaatcagatcctcccagcgcttgccttgcgcccaggccgcggtttgcggctctgccgaaagggctttgcggtcaccgagacttggtcgccgcccgaattcctttgatttagggcgatcctgcctggatttccgcgcagattgagtgatggaagatttgcgcgggcgggaaaatttgtctctccgctggattggcggcaatgtggatgagcgaccgggcggggagtgattgaggatggatggaagaagctcgcgaggacgaggcgtaaacggcggaagagattcctgcttgaaatgatcgcggagcgggggcagttcaatagctccgcgcattcgaggatgactcaagtcggtatccgaatgggtatcctggggaaatgcgggtcagtgccactgtggagagactcggggctcaaagcccacaacagcccggagcgacaaaccatgtctgtatcccagtccgaagccagccgatggtgatgcagttgtgccagagcaaccgccgcagtggctgcagctgggtggggttcatccagagctcgaggggtagccggggagccgtcagcgacatagacgtccctttccggcgccacatctgtgggtagccgtcagtatgtgcaggaatcaagacaaaaagagcagaaagactaaccctgaggtcgccggggttgagcgggttcggggggtgacagctgcacccgttgctcgagcggggtgttcaccatcatcaggaagctctcctcggtagccgggagcttcgggatgtagtggttcggatgcgcacgtcgaatgtgctcctgcatggagcgatagcgtttttcctatgagcaccaaccggattagttcgagttgaactccagagttgcacgggtcatatagctttcgcgagcccggtgataggcggggctcggggcaaatactcacacctagacatcttttgcgacaattggaaccgtcgttattcttcaagggacagaccacctcattattggcatcggttaccgaaaaagagctggtcagtgagcttcgaggaggcatggttgcatatgggtcatccgagatccccggagttgagataaaaaaaaggaggggcgaataaagaggtcagccgagcacagacagggtttatagtgaacaatagacaaaaatgcagttcaacatgctcttgtgtgtagaaagagaagaaaggaagaattggaaaagggaaaaaaaggaaaaggacgagagggcggctcatacattcagagcacttcgagggtctagtgggtgctgggggggggtattacgggtaattacgcagagttcgccttattctaatttttactccgtacttctttttcttctattattttgtatttatttctatcctatagattctagttcccataattctagatatgtagtcaggaacagctttatttctgactctctttatgtacgagctcgcatacgtggctatcgtccctatctgagtatcgataaccaaaaagaggggcgtgcagctttgagcttcccttgtaagaaaaaccccattcttggaatgttccacgctaaaaagtgaaattttaaataaaattgggaaaattgggaagaaaaaagaaaaagaaaaaagaaaaaggatgaaaccgtacggtatagtctggtattttaataccgaatagcacggcttttcggaaaccccggtggaacaccgagctcttaaacgattttcattacatttttacattctttttatgtggcatcctagatgccttttaatgcttcattcagactattaataaaatatatgtatcaacacacagaagatgcttaattttccaatcttcgggcaaaaggaaaggaaaagaaatactcgcgataggcgctatcagcggcccctccgaagctctccccagctcctgagcttcattccagaagggagggaagctccgggtggcgaaactagcgccacgttacagtgtaatattacagtattattcgattccgtggttttattttctaatttctaattttatactacagattattatgtagagccatccatggatagtacgaagtacatagtctaagattgaagaaatacgtataataatgtagcagaagaaacaagggaaggtatactccagggctcgtgtactcatagtgtaaaagcaagtgcgtgactttatatgccctacttagttaagtatactgataggcatactccattactatcatacaagtactccgtacctgtctcagctccgacctcctccgtttacccctaactctaataaagagcttcaatatttccagatgacttgattgcctagataccaaaataccaaaataccaatacccctaataccttgtataaccaactgccgatgaagagcatcccaaagcagcctgattggcccccaatccccaccgagtcaccaattacctccattgtcattggctgcaactcgcacgccatcccggttctgagtggccgtgcagggggcgatcaacggaaaagtctgagatttcaagttcgggggtttggtatgtaccgttgtataagtagtatcttgataataggatgtacggagtagcatataaaataataatataaagctcttatcagacctgtacacgacattgtacatactatcgaatacatacatgtacacaaatgtcaagcatgtcacgctccacttaatatgacaaggtggggagcttgcgagtcgagacgtttgttctagacagctaagtattgaaaggtatcttatctgcatcgcttagaattcatgcaaggtgcgtctagctttcatgcagcctattattatactccattgtactccgtactacatctaattccatccgatctcttggatctaagaatggccattgtccctcgtaatcctatttccattgtttagaccgcaatcccttcctgcagaccaacataccagctgtgtgtcagccatgcagggtccgacatcatcatggtaaatgtgtcgccactaaggggtggctgagctgatcaactataattgtacactcataactcctgttcgtgtcccatactcagcgtcatctgaaacccttgccgcgcggtttgccttcaagggattcaccccgaacaaactcgctcaaacgcagaaatgcagaaatgcagaaaccagcttggacatggagtgcccagtaactgattaaaaaaaaaaaaaaagctctgcagctaataccactgaatataatacatgtccaagcattgtcacatcctatcccgaccgtaagagacaccccccaatcaacccagaggaggcgtaatcataccagtaccattacaccccatcaaatccccatcttccccagcaaagaacagcaaagccgcttcggcagcagccttggcatcatcgtcatcctccaaaccaggaacgcgtgagcgataaatctgctccagatactcgtccacaacagccgcagaccaacccccacgacgcccaaactcctgcgcaagctccccattggcaaaagtatcaaactcgaagtgaccctggtacgtcaggacccggccggggttataaagaccctgaatagcgcactgcgcactactcccgatactggaccacggtgccggcagtgagactccctggtccgcagcagcttcagcctcaggcgtcggtaccactacatcgccgtggatcagctggatgcggaatggtttctgagctgtggcgcgcgccagaggcgggaagcgcgcggtgaaggagggctggagggtgatggggtggatgcccatttcaaagccagcgggcgactgcgtgacgtggaatgttgatgccggagcgttgctcgtgtttgccttggtgctgaggagggcttgggcgatgatctggtgcccgaaacaggagccgaaaagctttatgtttggatagtggtggtgcactgtttggatgtaggattgcagtgcatggatccagggttggtcttcgtaggctgagaatgctgagcctgtgattaggatcgcgtctattggactcagtggtccgccggcgtgaggctcggctggggcttggggtatggttcgtaaagtttccagacgaggtaaagacccgcctacggcatcgaaggccgttacatgaacggcgagaggtccgttttggaggcttcctgggattttattcaggcgttgggcggctgcttgcaggaggacgcgaaattgagagctgtatagaccccgcgctttgtatactgagatgcaggggatgtcggcgtctagcacagccacgtggattttacgttgggccatcggctagggtatcgggactctatccaaatgaacgtaatatgtcgaagagaatatgatatgcaagtgtacaaatataaaaagactgaaaaactttgatgtcaaaagggcgttcgcatcctcacacccgataaggatttcagtaatccggtggggcttcccaaagaggaagtcgaatccttgtctgtagaaggtctgatgaaggcgccaggaaccatatgaaaagagataaagacataaattaattagaatagatgcaatgctgggaagagactgtaagaaaggaaagaaaaacatgttcaaacggtgcacccaaagaccattcattgagagagaggtagaatatcaagaagcccgggagcaagaacaacatgcaatggtcgaaggtgattatatatagaaagagaaacactttgaatatatatacataggtaaggtgtgagttatcaattgctacttagaactttgagactcaagtggttaaagacctaggaacgtatctctaccatgtgcttccccaagccctaagacgaacccatatttgaagtaaagcattaagagaagtcaaagctctcgcccgatagcttaactacatgcatgagttccaaggttgatagatgagatctgcctaaagcacttcttcttttggatctaaacaacccgaccaggggttcatgcacgactgccgatatgatcggctgtggtcagaatatgttgtgctggaggatggataatcatagtctatcggccgagactgtgacaggatcttagagatgtgttgctaagtgctatttgaatattcctattccccccaaggtagatacttgaatcctcgggtaccttgcccttatttcaacgtcaactcctatattgctatttcacgaggaacctacaatctagcgtattcctctctttagtacactctttattaattctcttcacagaatgtcctaaatatcaaaccaattcgtgatcccccactgccatcacaacatccaaccccgcaaattgcgccatcccggccttcaacccccaatcagcttcacttagtagcggcactcattccgctatataaggatatatacctaggtaacctaccgaggtagctatgtcgtaaaattatcgggtctcgtcacgccatataatccactacattgctcaccatctatgtagaatatataaacataacccaacccttcggttctctgtacacctacatattcccatctttaataaccatggctcctgctgctacctcctctatcccaactgccccccatgacctggcagggcccatctcacgggatatattcccagatggactgaaaaccaccggtcaacatcccccgctatacgaccacatcatccccttcgaaaagttccctaaacaaatcaccggcccaacagtctggaaggccgaggaataccgtgagaacccagaaaaatggacgcatgtcttcacccaggaccagatcgatgagctgagctcggcatcggatgctttcctttcatccaagaccccgttgaccggaatctcaaaggtgagaacaatgcaagtcattcttggaaaattataaaacccgaaactaaccacaccgtcaatagaccaacttcaaactccccaatctagctgcctatctgcacgagctgcgcgcagacctcatcgacggcaagggcttcatcctcttcaagggcttccccgtcgagaaatggggtaaccacaagtccgccgtggcatacatgggtctcggcacatatctcggctacttcgtcagtcagaacagccgtggccatgtcctcggccacgtcaaggatctcggcgaggactcgacccagattgacaaagtgcgcatctaccgcaccaatgctcggtgagtttgacaacctcggtggccagtgaatgggcaagcaacaaagaacgaacaagcaactaacacaccccacccagccaatacttccacgccgacgactcggacatcgtcggcctcctctgcatcgccaaggcccttgaaggcggcgaatcagatctcgtctcctcccaccacgtctacaacaccctcgccatagaacgcccagacgtcctcaagaccctcaccgaaccgatctggtacttcgatcgcaagggcgagacaagcgagggacaggacgaatatattcgcaccagcgtgatgtacctcgagcgcggcgggaagggccgtgtgtatacaaagtaagtcccctcacacctccttctccaacctccttctccaatgatttatcgaccccgcgggtaatccacattccaatatctgacaataacaccagatgggatccatactatgtacgctccctcggccgctttagcgacgcgggaattattcccccgctctcagacgcacagcaagaagccctgcgcgtgctggaagaaacctgcgtgcgcttgtcgctacacatgatcctcgatatcggcgatatccagttcttgtcgaatgctcacgtcctgcatgcccgcaccgcgtacacggatcatgcgcctcctgctccccgtcgccatcttatgcgtctttggctggcgacacccgagaatgagggtggctggaagttgccgttctgggatagtaatgagaagaagaggggtggaattcaggttgataatcaggctcctgttgcacttttagatgccgagtgaggtttagttgggttggttgggatttgcagatttgaatgatacctttttttcttctttttcattctcttgatagggttgctgtatgcttatgggatgagggagaagagtatgaagaagggggagtatgtaaaaaggtcgggtagacgataaatgggaagaagatgatgaccctccagggctggcttgtaaggatttacccaattgcaccaacatatcattcataaatcatattccttaaagggtattttgtacatctgttccagcaacgccaaaagaaaaaaaaaaaaaaaaaaaaaagctcacacccgacagacgccctgtagctgatgctaatgcacgatcttgtaattacccccgttaacaatctccaacttgcccttcgagaccataccacctaagaactcgcgcagctcctcattgctgaacgggaacccgccgggaacggctatcttcagcatcatgacaatacgattcagagccataggtccttggttcgtgagcattcccacaataaactgccaatacacattcattttctccatggcagccgcctcggcggattcctttgctgcggcggctgcggctgcttcggctgctgccgctgcgttggcagtatcgcctgcttcgctatccgagacgtcactgaagtcgccagctgcgtgggcatggtgttcctcgtcttctgtggggaggaattccaacacgcggaaggtgtcgcgttgtacctcggtaagaatgcgcttgctgacccagaagagacaggcactgcggacaagggtaggactcatctcgagctcgtcggcgagttccggaattgtcttcgtggcgggttcgctcgagtcggactggaaggcgtagattacggttgcttgccgggtcgtcacttcgtctttgaacgtgtggttctgcaactccagctcgacagtgacctgacccaaagcgttgcgccacatgagcttgcgcgagtccttgcgcctttcgaaacaggtcgcgtaccgcgcttgcagtttggtgatttcatcggggaccttgaattcttgttcttggaattccggccagaagaagcgtgatagaaccttggcgtggagctttccggcgcctgcttgcttccgatatccagacaacatctgatcgttccgcacagtgaggtcaagacgtcgtgagtcggagatatctttcagcatcacctcgcatgcctgtaatgccgaatcaccgaaccgaaccttcaggagctcaagtactgtaacctcttggtcgtagttctggcgtttctggatgaggcggtctgcgagaagagtctgcatttccttcacgaaggtctccttcgagtcgaataagctaaccagactgtcaatgacatctgcgctcttcgactttttgtagtcgggagcggcatcaactggatcgggcacccagtacaagtcatcatagtctaactcgctcctattattttgcatggaatgatggtggaccttagtcagctctgctgccagctctgccaaggtgtcgccggtagctgtcggtccctcggctgtcgcagggtccgccaatagaccactaacaatcaccttcacagtgtcctcgcggtctctcaagtatcgccggattggtcgggcgatgcgatccagcagaacacccttcgggtccaagatatggaatgctcgaatgatcgagatgtaaacctgcaagatctcgactgtagaagcaccgggatgcaacagtcgctggagcaagttaacagaaaagatattcgtcgcatacaaccgcgctccagacgagttgtttgtgaaacgtcgcagatcctccaccgccccgctgcttgcaggccaatcaacaatcacatcaaagagttcgctgactcgaagctttcccagccgagcaatgcccatcacttgccacttttccacgtcgcgaaggctcacttccatcgccccggactgggctccagcggggtcggaattgatgatggctagaacatgcacaacgagccgtgcatagacattttcaatccattgttccaggtgctgcggcacggttgagggcgactcccattcgccggcgtatgcggcacgaatgaagtcgcccatcatgatgttcatcacatttgcaaacactttttgggcctgatcaccgccaagtccgacaagctgcagtccgttgagaaacgccaaaagtcgatcccgtgcgatagtcacgcggccatcttcaccatcaaccatcatgtgtgcccggacttcgggtgatccctgtttccagtctttgtacgagactgagtatgcccgttccatttccgttccatccagactcattatgtctgcatcggaatcttcatctagggtatcaatgcctaaaataaccacagcgtcctgcgtgagctctctggcaagaagcggtgaaatcttcttccatggtaaactgtattgaaccacggtgtgaaaggcacgctgtagctgagccaagaaccctccttggtggggagtagttatcaaaggaagcaaatagtgcacgacgggagcgagataaattcgacgcgcaagctgtaagcagtccactattgtccggagcaggccttcttcccccggggactttaacaactatgagaccgttagcacggacagaccaaccaaattcaaacgacgcacagcgtccataccttggatagcccagtccgaaaattgactagaaaatgcctccgaatatcattcccataccattcaaacaacgtccacggagaagttcgcataagatactctagcgcctcggccgtctccttcgacggagggctgagccggttccattctttcagcacttgacttccatcggtatttcggaagttgtaaagcaactcgaagccaaggttgggcacggataggaactctttggccgcctgccgcgcctggtttaacgtgtcttcctccggggatgtggtgtccgtcgaacccccaatcgtcgcgaatgaggttgactgtgagtctgctttgaaggttgacgatgagtcggatgattggaacgatgcgactggtgtctgctcgcgtcggaaatccgagatcgacttcgggtgagcttcgagcgacgcgggggagaaaacggagccgcagacgcgcctacgtcccacattgaggggtacggttgagagcattttgatcaagggacatcgggcattgtgagatgcagctggtgattttagttgctgcacgaagcttcgtgttcgatggttctgttatgccaatgtttggattgaaggtcacgtggatgttttgctaaagcttcagctccaccgggttttacttcgtttttttgttgtcgggtggatgagatggtaacggtggtgatcgtttggaatgttattgtcaatgaatatatccgaggaggatattatgttcctgccaaaaatcgaaaccaagcgcgagctgtaaatttcaccatctacatagtatagggtatcgctccaaaacaagagggcattgcatatgtacaaattcaaatccagaaagattaaaagaaaaaggggcccaaatccagatcccagccaaggcacacgaaaggtcgacacagagtttgcatcaccataaacgcgtcctatgtattcgttgagaggcccgggacctggtgagcatgcagtgtgcaaccatattccaccgagatgagagcgtagatatttcgagcttgtgtgtatccttaagatgcgtatccttgccaagtatccctcaagactgagtatcatcaaccttctcccactcgctatcagtgctcccatacccagacccctcaccaccagtgctgggtcgcttcttaggatcgcgcgccgtgggcagcaaaccggatgctgcacttccggtcgcggcagcagcagacttgtcatctatcctcttggccacgatagcttcggtctccgtttcgctgtcggcgctttctcctacagcgggactcttccgcgtcttcgcgtcaccggactcttgtttttgtttttctttctcagcctcctgcgcctgctgggcaagtcgcacctcggcggcgaaccagttgatggcccaccatagtccaccgctgatgatagatagggcgacgaagtgaaggctgtaggtagctagaaggagggcgaagaagataatctggagtgcggcgaaggtgacgttggtcgcgatcaagagggtcggggtgggtcctggggtgaagatgctggaccacaggtctcccatgaaggaagccatgatttcagaatgaagttgggaaatccgaaggttgcagggtgagagagggggccgggaactggaatccgtgtggggggaaaatggttaccggaagagacaccgctcagggaagatggacgatggacaatgaattccgatattcaaagatattcaaagatattcacaaaaaaaaaaaagaactagattttggattcttccccgtggggtatctggtctggatattaacaatgtacaacatagaacattctccagggctattcctgttaatattagttcccgtcagataaagggtatgtctgacactacatatacaccatcacgggagagatcggctagtcacttgactttccgaatgcatggccggcccgagacttcgatgtatacgatgtataacaacatagcctaataggtaggtacctccaaggcttccaaggtttacttggcgggtttcgtcatgacgattattcccgcgtgatgatttgaaatgatcattgtcaacagctcaggtgatagtgatcaaaggcctatatttgaactaactatatccctaggcataggtatataaaggacgacgtaagcttattccaatatttaatagagcggtagtgactcgtctagggctcaaagcaataccggatggatctatatgccatgcaatgttgcaggggcctatcttccttgacctatgcctatttcgtatacaagatgcacggtctggctagacagaagacgcaagaaagttgggccttatctctcaaaggccgagtatagacccaagaggcagttgtaacgcccctgaacaatgccgatagccgccgccaattgacggcgtgctattatgtctcttctccgtgttttccccacaatcgcaatagcgccgatcttccccaaacccgccgagccgtctaccactccatcatctaccccgacttgcacccccaagcctttacctcattggctttccggaccgggggacccctcccgacttcctagaggtcccgattcacggagggaacaagactcgtatactaccccagctgggtagctagggaaaatgggtataaatatccccggagtgcctccgaggtagagtttatcagagcgtttcccgcttcaaccaagaaacataaccctcaagtttcttttaacttgcatccgaatctccactcaatatggctgatgatatccccgctacgaaagaactatcccatgagccagtggaaggcttcgctcaccacgccgacattgccgcagaccgcgagccctatggcccacccggtctgcgcggtctcgcagccaacccattcgtggttctgtgtgctgcctgctcaacgctaggtggtttgcttttcggttatgaccaaggtgttgtgtcggtgattctgatcatgaaccagttcttgacggagttcccgcggatagacgagagtaacccgggctcgggatttgcgaagggattactgacggcgatgattgagctgggtgctttgattggtgctattaaccagggctggattgcggataagatctcgcgacggtattcgattctcgtcgctgttgctatcttcaccgttggctccgtgcttcaaactgctgcctacggttatcctatgttgactgtagctcggctgattggtggtgttggaatcggaatgttgtcgatggttgcaccattgtacatctccgaaatcagtatgtctccctactcggagggttctttcccttcctcccacatgtgaatataaatgcttattccaatccctcctattaggtccccccgaatgccgtggaaccctcttggttatggaagaatggtgtatcgtcctcggaattgtgattgccttttggattacctatggcacgcaatacatggccggtgaatgggcctggcgcctccctttcctgctccaattgatcccgggttttattctcgctgctggtgtatacgctcttccgttctcgcctcgttggctggcttcaaaaggtcgcgacgaggaagctcttgacagtctttgcagactccgttctctgccagcctccgacagacgcgttcgccaggagcttatggatatccaggccgaagtgcgcttccaccagcaaatgaacagggaaaatcatccagatttgcaaggtggtggcacaaagaatgccattctgcaggagctttcatcgtgggccgattgctttaagaagggctgctggcatcgcactcacatcggtattggcctaggattcttccaacaggtgagttctttatatgtggagataagaggtaaccgacacatgctgattatatgaatagttcatcggtatcaatgctcttatttactactctccaaccctctttaagacgatgggtctcgacaggagcatgcaacttatcatgtccggcgttctcaacgttgtgcagctggtgggtgtcactaccagtatctggaccatggacgttgtcggtcgtcgcaagttgcttctaggtggtgcagccctcatggccatatcccacactattattgctgctttggtcgggatttactcggatgattggccgtcccacaaagcagaagggtggaccagtgtggcctttctactattctacatgcttgcctttggagcttcctggggtcctatcccgtgggctatgccttctggtacgtccctactccttttatcctgttaatcaggcatcgatctaacatatccagaaattttcccttcttcccttcgtgccaagggtgttgctctttccacttgctccaactggctcaacaacttcatcattgtaagtttctcgttgccattatttggtccctcgatgtgtcacgggtactaataatctctgcagggtctcatcaccccgcctctcgtccaagacactggctacggtgcttacgtcttcttcgctgtcttttgcctgctcgccggaatatggactttcttctttgtgccagaaaccaagggccggaccctcgagcagatggaccacgtgttcaaagacaattctagcgaagaagaaaaggccaagagacgtgtgattgaggccgaacttattcgtgcccagtatgagaatgaccatcgggaatttgcatgaatcaatctgtgtcgccataaaaatatcaattgaacactagggctggctctcgaatgcgcgttcttgtatcttagcataaaccaggaatcttacgacattatgactttcatgaatgaaaagcagataattaacccttgcctagcgtggctgagatccgcgaaagcttagaactttgtcgtcagatccttaagtggtggcatatagttataactcgccacataagagtcgttctgtgcacctgggaccttcagtctgtgcacctgggaccttcagtggcatttaccgttattccagtggccatagcacaatgtaccactctgggtattacgcaagctctcaagtgtattattaggagaagacttgccaaagttgatctcgaagtcgagggtggacttcagtgtgatccatgagtttgacaggcccgccaacttgacgatagcgagtcaggaggtccttctgctaccactcccagaagacacggtcagcattggtggggtgcgatacaaaagagaagaatccaagtgcgttagcgtacacagtgataacactaagcacaaccttaactcaaaaaacgtgttattccaaggttcaaaacaaataaccttagtgctaagctaaacagccatggtatctcccgaggtcctaaacgctctctcctcaaacgccgcaaatggtttagacgactcctgatatagaatgcaaagccaagataagatcacaaaacaccatgacgcgccttgaaaattgataccttttcgtcgtaaaatagaatctcttgtagccggtaccgaacccgcgaagcaccctgttcttcatcaggttcggtgtcgtagtcgtccgggtcactggaaaggaggtctgtatcagccgcccccgaggcatcatcggaatcaccgctgtcttcttcagattcgtggtcggggttggcccacccttcatcgtcatcttcgctgtgcgtcggggaatgatcaatcgcggggttgtcgtcgaaatctagtggattatcgtcatgtcttgcttcaagaatttggtagcatttgatatggagaccaatgtaggcgatcttcagatctggacgtatgctaacgatgtccaaaacttgcagcgcaagctctttcaagtcgcggtgaacggtatggtgaatgtgtggtagatacaaagcacgaagctgagacatattcggcaatctctggaggaagaaatgctgcggagtcaacgttagcataactggtctggtagaaatattcaatgctagtgatcgttctcttacccaatcgcgataatgcatcgccattcccagctcttttaattgcggcatctttccacttgtgacaaaggatatcatgtcgtggttgaacatccacttgtgccatcgcgtgcccgaatatccggcgccaattatacggtcagtggcatcaatcagcacctttcgcagactctgcctgtgctttcgcagaatgtgcttgtaaatcgcgtcgatatgcacggcagattcatgacctggtgattcatgcaaataaacactctccagggtattcggggccagcgcatccttgataaacagtataagataaggtgaaacagtgtccgtgcgaatatgtttcaaatttagagagtactcaactgagctggcgcttgctcgacgttctgcatcctgtggacgttttgccggcatcgcaggaggagcatacttccgacgcaaagccctccaaagcttttcatgatcctcgcatcgcatgatagtgagagtagtcaacccagtccagtcaacggccggcagcagtgttggcacagaaagaggtacacgttccagctctagtactttgagggaaagtatctcgtagtcaagtttataagaaggtggctgtgagcgggcactccggttgggcacaccagagtttggtgggggctttttgtcattggtagtgctgggaggctgctgctcgccatttgcattcaatggagctgcgctttcggtagagtttggtgacttgtttatcgaaccctcagatggcatcgagctatcttcaagggaggtgattatagcattgtcctggtttttgtcaaggtgccgccgtgccaatataccaagtacaccatcagctctaggccaacccgttgagccagcagagtccttcccgcacaacagccacgcactcatatgggccttttcggcgataccaattcggagttcggagagacggttacgtgaccgctcaatgagaagagccagctcctccacataagcgggttcatctatgtcaagaacggccacgctcttgagcggaggcagtacagacaaggaaggatgttccacatgtttgtatttctggaaaagtctcgttgccgccgccgacgaactgcgtaaggcattctctgaattgtcatgccagcgcacccaaatgcgttccaggcgacaatcgtgtcctggccgatctgccaacgacgcaagcgccagccatatttcacggaccacaccagtcggcatgtcccaaacaaaggcctcaagattcaccattcgcgcaactgccaaggcaaccagcgtccctagcatcttgcccacttctttggttaccgagtattcttgtacccagctaagagggccattcccgatagagaatgtgcgggtatactgtgcataatgattgcctcgtcgcgatcggaagcgatctttgttgttgcgagggtccgagtccggctgatgatggagattatcgcaaccacagttcacacagctacttttgacttggccagattgagacagcggcagacgattgaatacatcctctcccattaccaacgtggacaaaccataagacagagcatccacccccgagtagtcatccgttgatgggttcagcgactcgggccagacgatgtcgaatcgggagtacatgtgcggaatagctagggaatgaagagcagagcatgtaagagcgagcgatgtcaggtcagtcgtatgggtcacctattgtagaccaggactgtgagctatgtattcacgatctgcggggaagacctgtgttacctctttgatgatctctttcagaatgtccaacggcaagtccagcagctgcagagggggtttcgccatttccggttctggaggggtgtgatttagaccttccgtgcggggagttgttggagtcgcgtcctgttcggaggattgattcaagccctcttgctccaagcgcaacttccccaaagccagtgtcagattttgcttggcgacaccttcaagctcccttgaagcagtgcttgggctggaaacaatatcctcttcatccgacaacaaggcgagattcgggttaggcttatcagcccaatccaagctggtgcccgccattagacagagtggggatacctgtaaggtcaaggggataataaggcactatgggttggtgaagaacatctccagccaagagctgaagagaagcacaccctggcagctgctttgttcagatatgttcgctttgcacaaagaccgccaaagatgataaataaagggaatctggggtagccagccttggagctcccgggtgatcgtctggtgctttatgtaagcaactgtcaggtccacgggtgaagtcaccttccaaggttggcaccaaggctgctaactagagatcagaggcgaacaagtgtagatagaagatattggtattaactacaaattgtaaagaagtaacaaaaaggatcatatttgtattctgtcttctaacttttaggcaaaaattatagaattgcatcaaacaacttttgttctttttcccccccaaacacaacagtatcattgtcagtctatacttagctgccacctccaattcttcccaaattaattgcagcgctaacacaagccaggtggctgaaagcctgtggagaattgcccatctgctcaccggaaatggccacttcttcagagaacatgcccaggtgattcgcgtaggacaggatgttatcaaagtgcgaaagtgcgagtttccagatgtttggaatgggcacatcatatttggcagcctgtatttccaatttcagcctagtcagcctagttcaatgttttcttctagttggcagttccagaaaacttacacgagccatggcttcaacaagccagaaggttaccatgatgaaggcaccctcaccccctgccatacctgtgcaacgcgagtatcagtacttgtttatcctaagaaacaatagaaacctaccgtcgttggctttctcatggtcatatcggaacaccatcttggcgctggacagaccctcatgctcggggctttgcagaatcctcctgagggtgctgatgaatcgcggatcatttggcgcaacgaaaaataccaagggcgcaatcaagatggatgcatccaggacctcgggactctcataactctggcagaaatggccgcgctcttcgttgtaccccttgctcatgatttcgtcgtacatatcgtcccgggccttgatccattcaaagcgatccgggcatggcaggctagaacgtttctccgcaaggcgaattccgcgatccagggccacccacatcatgatcttcgaatagagaaagttttggacctggccacgggattcccaaatggacatatccttgtggtttctaaccccgaggacgtagttgatcatacgccggatagagttccactggtcataggtgatggggtttccgtgcttgttgtacaggtagatactgtccaacaattcgccgtatatgtccagctgcgtgtggaagacggcagcattgccgacgcgaacaggcttgctgcctttgtacccatcgaggtggtccagttccacctccggaatgtcgtactctccccggatggtgaacatcagcggcaagaaaggtttcttgccgttgggatcaaggtcatgggaagcatgtgggaagatccgctcgaagatgaaattgacatacgattccgcttcttgactgtagcccatcttgagaaagacatacaacgtgaaggctgtatcacgcacccaggaataccgataatcccagttcctggcgcctccgacattttcggggagcgagaatgtgggcgccgcgataattgcacccgtgggcttgtacgtcaacagcttcagaatgaggagactgcgctcgactgtctcgcggtaatgaccacggaattgacacttgcgtgtccagtcagtccaatagtcagaggtttcctcctccattttcatgaggtaggctcccatggtggccgtgctggggacagacttctctgggctgtgcaagaccagatggatggtctgcccctccgacaaacggatccaggccacaaatccgcggccacggaggccatctcgttcctccagtttcaaagacgcagaggggaaaccaagtttatctggctctcgtgaatcggcaaagatctcgagttgcagccgctcggtctcactctcaaagtggacggtctgcagccggtgcttggccatgtcatcgtccagcttggcacgggtgttgtgcgagtctcgagcataattaaaagccgggaacatctgcacttgcagttccattgagccacggctacactccagctttctgatcaggcccgagtgctgcagacccgacttgaagcggttggtccccggttcgttgcaaggacagtatcctgacaacaaccgggactgctgcacaccctttttaggtgtgacggggaagtagtccagcaatgtcgcgacgccatcctcgttggtccacctagtttcgagcaggttcgagtatggaagataccgctgcttgctgtgggcatcgaccaccgtcttgtagggcttcacggagaagaaccctcctttcttgtcgtccaacaggcggcagaaaacggtaggcgagtcaaagactggccagcacatgtaatccaagctaccagccttgctaatcagggcacaggtgtgcatgtccccgaccaagccgtagtcctcaatggcattgtactgaaattcagacatgatgacaatgcgagagaactatcaattgatctgatacaagttccgaatgccggtgatgaagaccgaatgctcttttgcagcatcaacctaaggaagatgggaagagaagaagatgaagaaagaaaacccccaatgtcgcttattatccgcaccctccgacatatattattcccggaactggtgggagacaccacgacatgatgatgataatggttggatctgaggtcatggctatgcctgatttagggcttcttctccttcattggagataaaccttgagctcggccaaagacatattgtcggttctcaaatggactcgtatttgaggctagtgaaacctggtcttgtcaatcttgtcgacaacaatccatgccaatcccaccagctaaaatggaatgatcaagggaggttgagcttccgtataccgcttgaagctggcggaggtttcagtccgccaatgagaaatgacggggaagatattcctcagacatcaccaactcttcaccaatctcgggaaacgctggaatatcgggagatatcaagatatcaagatatcgaaataccgaaatgatcttttcctttttccccttgaccccggatcgaccggacagtggggataagatattaagatggtgtttaaccaatgagagaggtgaaggagagaaggagagaagggaaaatgagagacatcctccaagttcaatttccatttcaatttccccattgccattctttgaactcatctctttcttcattatattctctcgttttcattccttttaatttcatttttcctgttttgagctttcgcatttggatttttccccaacttcttcagccttttgacatccccctcgttgattctttgtcagcatattccccttggaaactctcgaggctttttgccctcgtgcactgttgtgtgacaaatcttattccatccacgttaatggagataacatctcagtttcgctctttaacttaatacctcgtaactgtcccagttatcagaatggggccctccgccggcgcccaccatcgtcggcgaagctccatgcttaccgggacagggcgagcctcacaaccaatttccacagagcgcaatgacacgctctggtcgcatggagatggaggaaatcacaagcgcgaggaacaggaacctctgaccgccgcagaagacaccgatgcgtccgatatcttatccgctgcggagactctggagctggacccgatgagttcggatgatgaccaatatgacgaggaaactggactcacaacacatcaaaaacgtcagcgacgtcgacggcgaaagcaacgccgcaagttggatgctcgaatcgcagatgtcaagagccacggttctattcgcgagattctgtcagacggaaacattgtcaagaggctgctcatcaacggtgggttgatcttgctgtggtatctcttctcactgtccatttcaatagtgagtgtttattcgcaataatttttggaagtcgagaaggaactaacaattggcgtgtttgtagtacaacaaatggatgttctccgagagcgatgtcgtctttcctttccctcttttcacaacgagcttacacatggctgtccaattctctctctccgttattatactctggatatttccatcgctccgtccgcgacaaccgacaaggtctgcggccacatctcccctcgatggccctgaggaaccgcaacccatcatgtccaaattattctacttcactcgcctcgttccgtgtggtgcagcaacctcgcttgacgttggtctcgggaatatgtccttgaggtttatctctcttactttcttgaccatgtgcaaatcgtctgctcttgccttcgtcctgttattcgccttccttttccgtctcgaaaagccttccaccaaattaatcatcatcattgccacaatgacaataggagtcgtgatgatggtcgctggagagacagctttcaatgcgcttggcttcgcactcgtcattgcgtctgcattcttttcgggcttccgatggggtctgacacaaattcttttgcttcgccacccggctacttcaaatccattctcaactctctttctcctgactcctatcatgttcctttcgctcatcactatcgcgctatctgttgagggtcctcatgagatctaccaaggataccttgcgctcgccagcaaacaagggaacctatttggctcgttccttctgattttccctggagtacttgcgttctgcatgatttcctctgagtttgcgcttctgaagcggtcctcagttgtcacacttagcatctgcggtatcttcaaggaagtagtcacaatcagtgccgcgggcattgtcttccatgataaactcacaacggtcaatgtgaccggtttggtcgttactatcagcagcattgcagcgtacaactacatgaagattgcaggaatgcgcagcgagctaccggaagaggatccatcgagtcgcgagtcgagtcctacatctgataccgacgaagctgagcatagcagtggcgatcagggggattatcgccgagttgcccatcaggactccagcatcattagccctacgccgggtggatacctcaacgatgatccccaatcgtcatcagccggtgacaaacgctcattccgagtgcgctctagtggtgcccggcgcggtctctcgatctcgacttctatcattctagaagatgacggcccgtcttcgccccttaaatcagcacctgcgaccatcactacaatggctgaggcagggttccctcacttacatgtccctgatcgcgaagcatcgccgggcgtacaatccagctcgtctgtttcgcccattaggaaccaaaatttcacccagaattagcatctcacactcattcttaaccactcctctcttattttcattcacctatattgcacatgcatatgacaatttttatcctatattctcttccatgttggagggtctgtgacctactcgaagagaacctagtatccctcttggaatcgcatgtctaccctgacagctatggatcgaactctgggtggaccagaatacaatttcttatttctgcttgcatgaagggggttgtctggattttggctttggcttaactgataccgtcaattgaatttcccacttccaacggctatatataaataagggttacagatttgctcctttgtattatgggatccttcgagtgttgtaatgatttcgttcttcattattatttagtccgaagaataacataaaaagtacacagaaccacaacaagcattcttgatcgccttgctaaacctctgctccgagcgcaagaaagaatacacatctactccttcgcggcaccacccttcatcatgtccatcagactcttctgtcccttggccttgcctgcttccttcgctttctttttctcgtccgcctcgagcttacggttatactgatcctgatgtttctcgcgctccgcacgaccctcctctgaaagacgagcctcaagagcccggaactcttctccttcaggatccataccaatcagcgactcaagtagtttgatctcagccgcccacacacccggatcgggaacagcagctgcgcccgcaccagaaggcctcttgggtcccttctttggctgtttcttcttctcggactcgctctcactgccatcggctgcatcatctccgatagctacgttctgctccggaacacggtcaatgggtgtctcaaggaccataggtagcccttcaaaccgtggctcgttcatgacattgtggaatgcgcgcaggcctaggaaccccgtgccgatgttggcgtgcagatcgcgcttgcttccgcgcggtgcttttgagtcattgaggtgcagagctcggaggaattggattccgattagctcgtcgaattcggcgaggaaggctttgaatccggctggtgatgtgagatcatagccggctgcaaaactgtggcaggtgtcaacgcaaatgccgatgcgagagtgatgctctttcgggattagagctagcaggtcgcggaattcggacagtgcgccgccaattgtgttgccgtggccgcacattgtttccaggacgggaactacggtcgtcgtttcagtgatggcctggactaacatctctgccaggcgggaaagtgcttcgggcaggggagtctggttggtacttccggggcttggtgttgttagtctgggctgatatggttggtaaacggtcgactcactggaagttgtaaagtgtaattccaagtgcctcgcatcggcgcaggtcatccaagaaggaattgtatgcttgcttggatttagctttatcgttttgggccaaattgacaaggtaagacccatgagggagaacgtgcctgggtagtagatgttagtgattgcattcggatccattcaaatgggacatattcacttggccgcatcgtaacccttttctacgcaaagtttacggaattgatcgcgatggtcgtcctggagagctgggttgtcccatttgcgctgtgacttcaagaacaaggcgattgcatttcctctgattgcaagattagaacaaattttaaaacttggatgtaatgggaagaccctcgaacttacccgatattctcactattatgtattgaattaaagacacctgctcgacaagcattgagttattatcgaattgagtcgatgacatgccgagaacactgaccttttgcaccactgacgtgagcaccgacgaacatacgcagacccttcgtccgcagtgccagaggcatactctcgacttcttggtctttcttggactttctcgcctttttaggtttgacgtcttcgttggacttcttaactggagccttctttttcttctccttggcagtatgaaccagacgtttgtcgtcaacctcttctttcaacgcaggagtaaattcttcgggctccaactccgaggcttctggagaagagagttctttcaaattcgtagtggatttctgccgtttggatcgtctgggtggcgacagttcagatgttccattgctgaggttccttttatggttgaccttggatccagagtcttcgcacatgggcgactcggatgcttggcaacacatagcactgaaagtggtcacagtgtacaaagcctcttggagctgggtgggtactctgatcgaagacccgaagaagttgatattgccaagcctcgcggaccaagatgggaccctacacactctgaagactcacgatgaccgaaatatagacttcattgaagactgtggtcataaaacaaattgagcttgtagaatagtctcaattgggtattctatcctccgacgctgtcagcagggtacaactataacgcatggaagtccaggaagaagtacggaccacgtgacggtctcccgggcaacagtcatgtgatgtttatcgataaccaaagattctccttgcagccccgccagagttattacttgcccaatttgaacttttggtcgacgagaatctgggatctgtgcgatctcatctcatttgtcgttgtcactaacatggcagcccccgacgaattggtcgatttcgatatcatcgaagcacaaaaggaaaacgtccaatcactgcccggtggccgatcagccagagaactcgcccggatattttcagctggtagtaacggcgacaaggttccctcgccatcgccaaacggcaccagaaccatcaacgatgctgtgcgccaagaattcgaaagtgaattgcagtcgataggagaatcggacgatccgctcgatgtttatgaccgttatgtcaagtggaccctgaacgcatacccgtccgcacaagcgaccgcagaatccggtcttctccccttattggagcgggcaacgaagtcattcctttcatcctcacactacagaaacgaccctcggtatctacgattatggcttcattatgttcgactcttctccgatgccccgcgcgaagcatttgcattccttgcacgtcataagatcggtgaaagtctggctcttttctatgaggaatttgccggctggctagagggtgctggtcggtggtcacaagccgatgaggtgtacaggctcggtatcgaccgtgaggcgcgacccgttgaaagattggcccggaagtacagcgagtttcaattccgatacgaccagcgtccacaagataccgggccctcgtcgcctgctttgccgactgtccgtcccgcgctggccgccaagatgaacccgttcgcgccatcagatgcctctgctgacccacaagcttcacggccctcgtctcagacaggtggtgccgcgaaaaccaagtctggaaagccgaagatggctatcttctcagacgccgactctgctgcaccgggtcccgcaactggtggatcgacaaagggatgggaaagcattggatcgattcgggaccgtaagaaggagaacgaagtggaggcgaagccatgggcaggagaaacattgaaggttgcgaagaaagcagcgccaacacaaaagatggctatcttcagggacgaggtgagttcttattccaggttgccctttccctcttcagacctccacatattcacgatcacaggactaattgctggcatgaacctatggtattttattatgtattcagtccaatccagatcttccttccaaaagaccaatgccacccaaagaagtacccgaacatcacgtaagggaagcgattaacccgcgcaccggccgacgcgaacgtgtatttatcgacctggaatccgtatatcctgaccgcactaaccctgcacatgagatgagtttcgaagaactcagggccatcaagcgtggttggatgggcaagaattggcggcaacaaaaagagcccttgcaacagatctctgggaacgcaggcagtaccgagtccctgccagggaaatctcattcaccagaggaattgccggagcatttaggccaaaatcttgccgcagctaatcacgatcaatccaaatatcaaggcgagagccatgggggcaaaactggcaaagcgagtcgcaccaagatcaaaggggaaacaacacaaacacaaacaggtgagtagtatcagtttttacttcctaggcaggttgatctgacatttgtgcagtcaaaatgaagtttgactccccgtccaataataaaaaggttcggcgtaagagtactcgggaaccgacaatgaccatgcacactcgtgcagcgacggatgagatctatagcattttcaatcagccattgaaggcagagactgaagaagaagcagatagcttctgcggtagcgattacgaagatgacgactgcgacggagatagtacaggcacagggcacatttcagcggcctccagcgactttgcagacgaggagactcaaactttccacaaatcctacgatgataccgactatgccaacacgacacgagctgagagcgtcgatggcgatggcagcgattggacagagttcaacccagatcgtgatatcccagatattgaaaatgcggaagtcacctcacattctgtcgttagtgatgaagcggagggtagctcgacacaaggaacaccggagaggaaaggatttgtaccggaaatgccagaggactatgctccgccatgggggacctaccgtgaccctgcggtcatggctcagaaccgccttcccttcatgacacctattgtggagcgaacggagtccattccttctttgacaaccgcccgaaagagcatttataacacaaaaacgccctcgaagcctcgatcaccagacaataactttttgctttccagtccactagggacaaatacgccatacggagatcatactgttgagtctgcagctgatgtaccattcagtcccatggccttcaaggccctcgcgcccaagctccggagacgggaaccgataattagggatgcgcagtgcaatccgactgacaaaggcattcgcaacacgattctcaattccctggaaaagccacttgcgacgtacacgggttatcacggtcatgttgaagatagcaactatgcttcgatgatccagaaattcgtcaagactagcaccaggcgttcaaagagtggcggggatgatgcatttgacacacctatactcgaatttccaggggcggaacgaagctacattattagacgtgagctaggagccggtgcttatgcccccgtctatctcgccgagagtgtcgacagtcttgaatcttatgactcggactctgatgatggcagaacccctaacggcaaaacttcccaactgagaaagtcgaacgcttatgagactccacgattccccttcgaagcagtcaaggtcgaaaatggaccatcaagtgcgtgggagttttacatgattcgcacagcatatagccgcctacgacaatctacggatcattctcgcgccatcgacagcattgttcgcgcacacgaattgcatgttcatcaacgtgaaagtttcctagtggaggactatcgaggacaaggcaccatactcgacctcgtcaacttcgtccgcaacgagaccatcaatcccaaccatacttctgaaggcggtcttgaggaggtcctagcaatgttcttctccgtcgagctattccgcaccgtcgaagcactccacgccaacggcgtcctgcacggtgacatcaaagccgacaactgcctcgtccgcctagacgaacacaatccaaacgagccaccctccaaggccctctccctactcgacctcggtgccgatgaaaccgccttcgatccccgcgaaagcatccactactccccaagcggctcctacggctggcaacaaaagggcctagccctgatcgacttcggccgcagcatcgacatgcaagccttctcgccaggtgtgcaattcatcgccgactgggaaaccggtacgcatgagtgcaacgagatccgcgagatgcgcccctggacccaccatatcgatctttacggtattgccggcgtgatccatgtcctgttattcggcaaatacatcgaatctaccgccaccgacggcaacagcggcaatccatcatcccgcacctatcgcatccgcgaatctctgaaacgatactgggaccgtgagctctgggctggtgtctttgatctcttgctgaaccccggtgccgagcgctggcagcgcatcgagcgcgagaacggagtcgatgcgggtttgtcgtccgcgcctattctgcccgtcttgcattccatgcggtatgttcgtcgcggcatggaggagtggctcctcgccaatgccgagaagaagggtcttgctcttcagattcggaagattgaggctctgcttgctgagcggaagaagaaactggagaagtgattttcgttttgtcttgtttctgatccggttgttgtgttgaattgcttattgcacatatttttataacttatacccccatcttcttctcatgttatgtttgcttgttactcttgttctgatttaatcttgtttgttggtatgttggcctagtctgtagataatatctgatactgactcttcgtcgcattaaggccagctattcatgaccattccaagtatcctgagttcctcttgctcgctgctaactatgactttcaagtataacaaaccgggggtaaacggaccaaactagagcttacgtaactagtgtggatggcccggggcccctaaggttgacaagcctggtataaaaccttgtaagagcatgctccaagcgagaacgaggaatatagtagggggtctatctgttgcgagtgatacctgcaacatacgtacgcattgaaaccccgtggcaaaagtgcagtccttcaaggatgagggaatctgctcaaggactcaggtacaaagtcagcgagcaatcggtaacctacaatcgaaagaagagatgaaaatggaaaagatggtaattcaattggcggatcagttcgatcaaacaaagccattgctgtaaaagatcaaccctcgcaggaacaagaataaatcagaagaaaaatagataaaacggccaaactctcacaagctccagaggaagatcagaaagatccagcaaaaaagctctgaaaaaaaaaaaaaaaaaaaaagacagacatccatacgccatgagacgcagaagagggcaagaaagaagacctgagaaaaagacacgcgattatccggatgcaaacccaataaggctcgccacagggggaatcatggagcgcgagcggaatcaaatcgaggatcgagggcatggggaaatcgtggatcaccaatcaagaagtggaattatccggggaaatcagcttcaagattgagatcatgagatgcaaagaaatgggaatcactggcaaaagaaaaccaaacacctcgcttgcgtatcagggatgtcgttggtcaactgcaatattcatgcgtgttcgtttcgtttcagttcgtctatgtacttgcatatgtatcgttgcacattcgctttttgggggggtgcattgccatcctgttgacaagggccaacatagaggcagggagtcgtttccatgtgtgacgggtaattcgaaaggtgaccattatcaagtcgggccgcatctccaagatgacatgggaaaggaatgttgtaccatgtaggagatgcagggataaacgactagacaaggtctgagaaaagaagatacaagggaatatgtaaggagcgtgggtcgcaaaagatagcgattgttgctgattgctcacagcagatatgggttttcggttgttttcaacttttttttggtatatttgggtgattttgttccaggtgaaagccccgtcgaaagaaaaggaaatgaggttgtgagtgaatgaatgataaaactgcatcgagaaaaatcaatgctggtttcaccgagtaaaaggtgcgaaacacaacagacacacaaggtgattgttgttacggcagacgaggtcaatgttcgtaggcaggtaaccaacagccagatgccgatgtactgtgtgcgggtttcgaccaaatgaaaagcagaaagacccatcactttttttggggggattttttgtcgttagggttcaacgtgacgttgagggttgagggcgaggaaaacgttcaaacgtatcgttacagtcgtcgatggtggtgttactgtcataaaaaggctggaaatgcaaaggccgtaccagggccctatcggtatctcgttcaagtcataatgcaaagggggataaaatctcgcaaagaaatcgaggccacgatgaaacggatacttgggaattcgacagcaaaagaaggctgcaactagttgcgtgtgaagggcatattcaagatttgccggcggatgcgctcagcatcagaaaggccgtcctctgaggcattgtatggcaaagtaccgggagctttgtcatgtactcgatccggagaaacttgcataggagaagtgctgtcatcaggtccagcatatctagggccgtcgctcgagaatggatcagacagtgcaggtgctcgtctaatggcccgcttcggggcttcgcgacgcttgcgtcctccttcgatccggaacggtgagccaaggcgcttgatgttttcgccgaggtccaacaatgggttcatagggggtttcagaacgggtgtagtctcctcgggttcaattgggcctgagttgagggacgagggcggagagaatagctggtccatatctctgggattaacagcgctagtggtagctccacgattgcgaatgcggacccgaccatggcccatgtcttggaacttgttgtcacgaacgtagttctccaagcgacgttcaacctcttgatcggaaggattattctgttttctggatacgctcgtgaatacatcatcagtactgggcaaagactggtcgaagtaggtgttgcgtcgggcacgataacccggaacatggacggtctcacgtcgagcactgggatcatggatctggcggtttaatccaccggggccccaagtgctgtacacgaatggagatcccaggcgaggaatgctaggagcagattcaacacgaagatgctgactgggggtcttggccactgctggctcgacatgagcagacacggggttgttaaaccagtccggggccaacggcaagttttgtgtaacctgagagagtgcagtcggctcggtgacaagagaaacgccgaggtcacgagtagcgtaggccgagctatcagcaaagtctttaacgcgggtatccgtaggagggccgaacatctcgacgacgggctcgggggtgcgagactgcatgatgcgctgatagtggggagaaatcgagaatttgcgtcgacatagcatcttgaggcgtcgtcgagtcttggagtcagacttgggccaggctggttgtatctcctcgtgcacagctttgggtgtagaaatttcgatgggatcaacagatttcgagacagattcaacaatgcgactgctcttttggccccatgtcttcttggcgcgtcgcgcaacacgcgaggtgacccccagaggggggatactgccaggtgtcatcttgaatggagtcattgtgggatcctgaagataaatttgataggtattccacaagtgggtatccatctcgcgagtccaggacttcttggacactttgacatccgccgcttgcttctgaggtcgcgaaggcgactcaatttcaggttctttggacatttctaaagggaagtgcgagtcaaacaggtcgctctcgacactggtgaaacttcctacagatggtcgtgatgcgaacgtttcgatggattctactgaggaatttgacagactcgagcaggccgagtcagggcgcttgatgttgttcgggccaggcgtctggtcccacgatggccacgggtttccagtgtcgcaggaatcgaaaggcgtgccgcggatctgcgcaggcggcgttttaaaatccattcgcgcgcgaggaggcgcaagatatctctcgtcattggcgaaatcgcggaatgaaggcggctcgaaatcgatagtcgactggggcacttcaattgagggcagaggaacatcagagccgtggaactggaacatatccatgtccatgcgtgcgcaaacattggtaccagcgcgagcccgaaccctaggcaaacgaccactggagattgagtgacgaggtggtggaggcacatccatagtggtacgagggcgctcgggagtcttgggttcattgtcgccgagggagaaggtaaagttcttcggcagagtgcgcgaaagttgtcgttgagccatgctggcggtcttgaggtcttgcgaaccgcagagcgtgggtcaatgcgatttatgggagtaactcgaggactcgggagttgaaagtagatgagtaacgcggcttcgagtcgaagcgcgcagcgtcgcgtcaatgtcgtgaatcgtcaaggggagtaagagaaaaaacaaggaaaatgcaacgacagaagatgatgcagaagtaacgtggaaatagaaggaaaataaaccgaggtctcggtgtgcgtgatgtccttaggaatgcggcaacttgaaatcggggatcaccagatcacatctgcggctccatcccgtccgagtagtagggaatgaaggatttcgtcattacccggaaataaaaaaacacacaaaagaaaagaacgtctcctcaaatggagaaggggtgcgagaagaatatctcgcgataatggtggaaagggtgttggtagtgagagagagaagagagaagaagaggattgggggattgggcgtagggtgaggcgggagtggtgggggtacttggtacctgtgctccccgtactggactgcctactggacttggtaccctatacttgttgtacttggcccactgcgaaaatcctatgcgttgtactaaaaactcctatgaagtctttgaaatgttcgattcaaccttctttctcttcttctttacagagtacagactgtttttttttgtttagattttctcgagtctttcctatatagagtgtggacaccccccatctgggccttgcttaatgcatgcactgtggacaaataaattggcataccttgggaggtaaggacaccttgggcaaatcaccactttttggttctaagctgttgaagatacatgcagtgtaagctatacggagtacagagagtaccgagtactccgtacctacttaggtagataggtgttgtcgaccctcataaatgagggggctggtgtttgggatcaggtaccatgtgctccgtacggagtactccgtatggtagatcggttctccatcttcaagacatcgtctccctagctgcaagggcttgtacagaacagaacggagaacggctaggctgtgtatagaagtgtgatggtcgtccctgatattcttcagctcattcttttctttttttttttttaaacttccaatcatacttgtagtggctcaggcttcaaaagtaaaagtccatccttttttttttatggtctcccttttgtagtgaattggtttgttgcggtcaaagaaacccaaaaaaacaccctcctatctatattgtacgggtacctgggtaccgccgatcacctaattctcattgtgcggtctggatctctggagcaaagagcaaaagacccatataaccccattgggaggggacgatggaggaggcgtagcggttggagaagcttcacgttcgtttttctccactgacgcgcgacgcgtcccacacgtgttgaaaattaccgtatgcttcttgtatacttaccagtcacgtgatatctagcatgtgaaccctatataaccagcagggggacagttacttcctttatatcattgccactccgtaaagagtgtatatgtgtgacttatgcaccgttgaaccattctgcattgaaatctgtgatgaattctccaatccagccctggagggatccattctcaacagatttaggaagatctcatctcgcttataatggatagccacagtatacccgcagaactgtgggccacataccaattaactccactttcgaggagagtgctatctacctcgaagccctggactggtccttttggaaatgactcgatatttcaaacggagcattcaaaaagatccagcttgtcccctggcttataagtaacatcatttggtgattaaaacacacaaaagctacccccgtaaatccaatgtacagaacgaaaggagggggaaaggcgctgcttagatccatccactactcacctaggaaacccaggtcaacctccgactcacgcgaccggaatagaatctcaacacgtgggtcggtgatagactcgacaccattttcgatgttcgggggtcggccgccgctctgtagtttccagtcgtacttcaggagcaaatgaaggagcataatcttggtttcgttggcagcgaaaaaccggccagggcaggcgtggataccatggccgaagacaaagtgctcacttgtcgtcgttacaaattgatgtctgtgttcgttgccgggctgctggcgtttcttgtaaaatcgatagccatcgtaagtggaagcattagggtagatgctgtcgtcttctagtgttttcgtggaaacaaacatgttggcgcccttgggaattacagttccatcggagagcacaatttgcttatgagcgaggcggttcatggaggctgtggtggagtgtcaaaaacaagccattcttaacgacaggtttgaatgatgaacatggagagaatgtggacttactcaatgagagtgggttagtacgctgcgattccttcattacactgtccatcaacttcaacttgagcaaactagtcttcttcagaactccatcctcagcagcaaccgcacgaatctcatcacgcagcggctggatgtactctgggtatgccgcgaggtcataaatgacattggtcaacaagttcgacgtggtatgaatggcggccagcgccaatccaacctgagcacaagactggtcaaaggtcaaattattccgggcttcggcggtctcacgataccagtccagagcgtcaggtccacgaggtggatcatccgcagggagcttacccgcgcgaatcaacgcccgcctgtctatctcgcggctgatgatggagcgagccatttttaagtgcttgcgtagcttttgcgtagagggcaagaaccagtgtacgaccggatggagaatggatggccattctcgcagatcgcgcatagccataaacgcatcgatggcatagttcacagaaacatcgatccactcatcgtcgtgggagatggtctctccaacgaatatcagagaggagaggcgggctaccatgtacggaaccttttgcgcgaaatggcagggcttccattctgccgaagggtggaagtgttagcgagagggttgcaaatggggtgctttaacataccatcggtggcgggcaaggattccttcaatatcgcacctgactcctttgagagccgaagtgaaatagaccctgtttaaaataggaaagataagtcaattctatctcgtaggtgagatgtatagtcgtagatgcataccgagagcctgggtcaaactggtccgcactatctccacagtagattttaaagcggtgccattatgaaatggttcaaatccaggaatgcgattctcaaagaatgtctatcggcaagttagccatggtcacggattatttccggtctcataacctgcctttttgatggagtcttcaaaactcagatctgggtggttcttaatttcatcgacaaacttcgggtgcaatacaactatcgggctcgtagctccgatgatctgaaagacactgactcccttcgaaggcttgttagcatatttgagagcaaagatcactgtcatagtttcccgttaaaagattcacctttgcaaagccttcggcaattagttcacgacatgactgagtaaagcgttgccgggcctttttgttggtaagctcccaccaggtcttcccaaccaaaggaatgcgcctatagggaatctcgttggctatatcgggccaagcacttgttatgaacaccgccactagggcgatgcacacactctgtacaacatagggactattgagtaattcactgatgactgccatagtcaaggtcgagactgaaaacggagggagcagggggacaatagaagcgacatcccagtttcctggaaactgatattctccgagggccttctcatttataatagttcccgagccatcgaccagtcacggagactccatcttttttttcccccaaccgaccttggactggatattctaacaaggggggacccacgtcagtatcaagtgctatcaacttgaatcgaaccgagccaaagccaagcaacattgaaaagcgacaggtccaataaggtcttcgctgaccaactccttttaccagaacatcaaagctccgagaaaataatattcttggcctacatcgatgtatacccagcctggaatgcgagaacgagagccaaattaagcgatccttacccgaacaggcaattcttgaccggggtttctattccgtctggctccacttgcatatgttgtatgcagatggtttgcgatctataaccgtgccaatgataatattccgtagaggcctgcaaattctgcaagttgaacggtagaatcactagagggggggggaaaccagttctgtactccgtgatacaaagaataagaaagtctcggtaacccagagaagataatttcttttgaagacatatagcaatagcagacagatctaagcgaagctgcaacatacgacatacaacatacgttgtatgtatgatcctaaaatatgaagccctaactggtcagttatatagcttaacggaattaacggaattaggctagtccaaatccattgcagtcccaaggttccgccaagaccccgcattcgtctcgatgcccttcccaaggttcaactgttcaacttcccccccgcttaaaagtcgtctttcttctcaacttcacttttgagattatccgtaaatatgggtgactacggcacggctgttccatatatcacccccacccctgtcgggaacagccgaccacaatcctcggcttcgcttaatgagatatccgtcctgataacaggctttggggtaagtgatctgcgcttcggatgttgcttgtatccgagccgagaactaacagtgtaaaccagcccttcaagaccaaccttgtgaatgcgtcatatctgatcgcttcctctcttccatcatctttccttttcccgtctaaagaccaggactcggatccacgtcgagtctcactccatgtacatcccactccgatcccagtggcgtatgccactgttcgagaggcccttcccttaattttggaggagttcgctgccaatcatggtggtcgcagacctgatctcattattcatattggcatcgcagctccgcggcaatattactccgtcgaaagtttagcccatcgtgatgattataacattaccgatatcaatggtcgccccggctatgtggatggcgagaagcgatggaaagggctggggctgccgccgattctgatcccaggtcgtgctacagatgatccctcctctgcttcgccttaccagcccgacgaccagttcctggagacgtggcgctcgtttgctcccgagtcggatctccggatctcaaaggacgcaggtcactacctgtgcgacttcattttctacaccagcatgtctttagcccaattacaaggccaggatcgcaatatcctgttcctccatgtccctggggggtcagaggatgcgaatattgagcaaggccgggttgtcacactcgccctaattaaggcaatggtcgcgtgctggttcgataaggagcattcggcataaccagattgcagtatcgcagtcagctttgtctttaacaatatactctttcggggtgtctacataggtgcatagtgttgtgttaattttttttttttttttttttttgtcttttttgggccccagcagttgtttttcctggacttatatgcattaccggtttctttccatctcgtttgttgcatatttatgtggcatctcccaggcacaaggtgcctgattcatacttccctggcttcttttgtcgttggacctaacgcagctaccatgtacaggataatagggtaaggcacagtatattaacagaaaattataaaaattatagcaaattgaaagtcctcatctacctggcctcagcacctcaaaataaggctgtagcctcatataaaaggtaacgcatatacggagtatacattggagcctccgaaatattcggccaaattttgtaccccaagataccgccctacaaattcttccacttctgcaggttaaatacgcggggatctgtgtataggtgtattttgcaacattatgcagctcgcacggtgtgttgttaagtatacagtcaagctcaggtcttcatactccgtacactccagcaggtgcagtgtaatgtgtggtataactgtgtacacacgtgacctaatacctaatgggtagctagcagtattttaacaggcaagcggtatatgtggcggtacctgtggtagacgcgggtacaaaggctggcccaatacttcggaggttccagtggactgtaagccctatttaggtaaaccatctcccagcaaacatgctgcagtcgcacaacatgacgtcggcagtaatattaggtcttatactcctgattccaatccttctgattccgcgcttcacgggatggcccaaattgatccaatccccaaccaagcttctcctatggtgccagcgtcccaaacaatccacggagatcatctcgttgcgcatataccctataaagtcctgtcgaggcatagaagtccaatcaacagtcctaaaacagcatggccttgacctcgaccgccgctggatgctcgtcgacgcatcgtcaaataccttcctaacaattcgccaaatccccgacatgacccgcatccgcaccgccctaagtgccgacggcgacgagttggtcgtgagtatcccgaaacctgaatccaacgaatccacccaagaccaagaccaagatcgtcaatttcatacaatccgcatcccttcccatccatccccgccatggctagcggcaaatacaaatatcggccccgtacacatctgggacacagacacagacgggtacaggtacagcgacgaaatcaacgcccccttctccgccttcttgggtcgcgacgttgtcctcgtccacaagggcccgaccccgcgcgtgctgaagggtaacggcgccccacaccgtctgggtcgcgtccagacgaccggctttccggatgtgcatcctgtacagattgcgtcggaatcttcgctggcagagctcaatgctcgtctaggaaaggtgggtatagacccgattactgttgagcggttccgtccgaatattgttgttcgcggcaaggcgccatggagtgaggactcgtggaagttggttcgcattactggtcggaatgctgttggtatttctggtgattctgctggggacagtggggctgctattcagtctccgctggatctggatgttgtggctcgttgtgcgcgctgccaggtgcctaatgttgatccagatacggcgctcaagaataagaagcagccgtgggatacgcttgtttcgtatcgcagggttgatgaggggagtaagtataagccttgttttgggatgttgagcgcaccgcgtaatgagggggctattgaggttgggatgaagttggaggttttggaggagacgactgggcatcgatatgttgctggcttttagggggggttttctatggtttgtcctgatcttaggagacagtatacaatgacgagatacatagagcagggcattctaagctcggatgttgaaatggcaaacataaaattatcgtatttttcacatttctcactgttatatatcttggagtaaatctgggaatacatgccgaggtcctttcattcctttcataaaattgaaaacaatcattccaagctgatgtttacttaatatatatatgcgacgatagatcttgatatgaaaccagggaagggagataccagaccaaacgtagtagtaatttagaggtggactagacggtaatcgttgaatgaacatgataatggcattgatattgataactagcgacagatcatactcgcaatctttatacaagagtacccaacctcacttcaactgcttgctcgcagagacacaccagttattccactcggaaaaaaacgacggctgcacatggcacttagtgctcatgagctgatccttgcgagtagcggcgtaaacgtccacaacacccgcaatagcatccttgtcatgcgcaacaagcactttagtaacaagcaaactagcctggctgcaagcagtcgcatggcccataggtccactgtgactagcctccttatgaacagaccggagcagctcccagagcgcctctacctgtccatcgtcctcgatcttcgggagcgaattgcccttgcacaccttcgtgtactcccgcagcactccgttggccttggtggcgatctgtttcacgctggtccggcgagatagtcggagcaacggcaggaggatatctagcgcgagcaggcgggtgtggctcttcttcacgaatatctcgagcaggtccaggacgcggttcttgaagtttaccatattctcacgtgcgtctttcttgtcttttcggtgggaggtttcttgacgacgggcgcggaatacttgcaccagtttgtcgtctagctcgtccatctcgtcgtcgttcatgtcggcgtcggagtcggacgcgtcttcgtctgcgcggtgtgtgccgagagctgcggctagcttggcttcgaaggcggcgacttcctctgcgtcttcttcgttatcttcttcatcttcctcctccccgtcgtcggacccagagccagagccgccggcttcgacaacctcaacatcgctgtcgagctcatcctcatcgacatccatcatatcgtcatcgtcgtcttctccttcttcctcgccttcatcgtcttgctcttcgaacatctcttgctgtccagcaagactctccttggcctcaataatctgatctagttagaaaatgcatgtctgaaagaggttgaggctacataccgaggtcaaagattccaacccgttctcggtgatctggttagcaaaggcgccaaacacctgctcactcatacgacggaacagctgcgactgcttggatgcgaaactgagaaggatctcaaccaacgcatccgaggcatcaccagcatcttctgtcttggtttccttgtcgcccaggaacttggtataacagaactccagctcatcaagcatggataccgcgtctgcatctccattgtacacctgcatgatagtcatagagtaaagcagcttgaatgcagccatgcccttctcctttttctcctatattgtagtcagtataagtgtccaagaggccgatgagggggggggtgannnnnnnnnnnnnnnnnnnnnnnnnnnnnnnnnnnnnnnnnnnnnnnnnnnnnnnnnnnnnnnnnnnnnnnnnnnnnnnnnnnnnnnnnnnnnnnnnnnngcatcgcgaatctgcttcaccacagcatacgggagcgtagcggcaaacttttggttggagataaggctgttcaagcaggagttgattcgattgcgcaggagttcttgtgtcgctgatgagagaggaggctcaggggcagtggaacccttgccggcatccatgaagtacgcaaagcgcacgaagatagacagaatctgctcaagacttgcttggaggtcatccgcatcgtcttcactggcagaagccttggagcgcacgattgacaagaggagaccagcgacgaattgacggttggatgcggcggttttctcctcggttgtgccaggattttgaataagtttttcgaagaatgggacaatctcttccaatgcctcgtggttggcttcggcaacgatcttctcaacagtcttggtcttggtagcctggtcgaagttcagcgtgccgctggttcccatcaagccacggatggctgcagctgcgaactcaggctccttggacacacgggcctggattgccttggccactttaacggccattcggtgcaagtaccggtcctccacggcgagctggttcgtcaagcatcgcatgagattcttggtgaaaatcagagaggcctgttgcgacccgccatcgttgagaattctgttgaaaagaaggaagccccagtatttacgctcgtccgaggatgcggcagcgaacaatccatctatgaggaggtttttattagttccatgtatctcaggtataattccgctgtttaataggtacttactgtccacaacctcagtccagaaatcagtgaaggtcatacgagacttcttcgacttgtccttcgcctctacactggtgcgagacaggaccgcatcccaggcgaagtgaagcttgttgttccaaacgccagaggacttcgcagtgttcaccttgttctcgccctcgctggccgctgcacccgattccttcatgatcttcgacatactgctgcgctctttcgaatccaagggatcatcatgcttccagattttgctcgggaaggtagcgttggggaacatatccttcgccgccaaccagatagcaacaccctcgggcgaccgggcgaggtcgcgcacgcatagctgttccagcgcagactggatgtacttgggttccatcttgcgcgcagccagatcgtagacacactggtagatgatccacccacactcttcgcggatccatggcttcttctgtgcgagttcgagaacaagatcgataacctgggtccattgctcaaagggcacggtgggctggaacagaacggaagacttgatgatcgcttccgcgccgaaaagacggccgaaaagatggtcgcgttgctcctatatgaaccggaaggataacctaattagcgcgtgcgacattttatattatgcgtagccaccaacctgtcccgactcgctgccgtaggaactcgactgagattcccagaggttcagagcatctgagaagccaaagcgtgatgtctctctcggcgatgagaagacctgactcaggatctcggtcaaggcgattgagaatccgattcgagcagctttgcggctactgcagagaccacggaagagtctcgacagcaccttcttgatctgttcatcggcagggttctggtccggagtgaattgtgacactagtgcttgggcagccttgaggcgaatgtcatctttttcgctagcaagatcctcgtagagttccaccagcttcacgtcgacattgtgaggttcgcggcggcgctttgaaccggcgaagggagggcccattactgagtctgggggtttggggatggcggatatgtgcgaggttcaattaacgatcgaattatccgctctcaggccttgacaacggagatctgcaaaccaaaggcacgttcaacactccttgcggccgttcgagttgctcagaaaaattcatgctttagcctatttcggactagtgtcaactgataagctgataaggattttgatgctccaaagagacgggcaaacgacctcactaaaggtggataattttttagagtattgaggaggagacctggagcttatgatttattgcacttgttaggaaaccaagtgtggcggtgcgaagatatgtgcgaagatattcaaaggttccaagcacatatatattgtgccatctgacccattctcagcgagacttggagccctggagagcaacgcaaccttcatctgcccacagctttatgaggagagattcgaaatcactaccccgtaagtcaaatgctacatattcagcctacgataccagccaagcaaaattttagcccccaaaaccacaagacctagactgtcgccaagtagctgaaagcccctgggagccgcagcaaagacgcctcaaaaaccacgcaacagatcaagcaggacaacatgtaagcagcatttcaatagcgaaatcacatggtgtattcggagctgtcagagaaaccggggtcaaaaaagaagtccagactgattcaggggtaatgacgaatctcaaaaacgagatcaccgaagttccagctgagccatcaacctcaaaccagtccagacgcagaactatcctgttgtcaaaggcaaccgggaaaccagcatccatttatacaatcgtatgtcgccgaggaaaacccgctaattgcgctggatccgagcttcaggatccgggctccgcttgtgctgatttcgcggatgcaccgacccgccccaggctgatctgtatacgagtatgccggacaaagcgacatattcttgatagggaaaagcaggaaccgtgcatcgaactatcaatttggctggaggtcgtttgacgtttgacagaatcaatattatgtagtcgggagaaaattacctctgtatcagaattgatgtgttggaacggatgggggatcgtctgccgtggatctgcatggtttaagtagtttttagtttgaggtagtcgtcgtgctggtaacatgtgggaatggatttcgtgggcattgcgcaggtggttttgatgtaggctgatgggtctcggattgataatatatggagtcgggcgtcttggtgggcctgggagtcctggcaaccgttgtgatagatgtttgagtcgggtgtcagatcttgggcgttcaggggcttcacgggttgcctgattatgcaactgtcacaatatcatacggttttgtgtgacttgggaggctgtacagaagttcggaatgaaatttggctgagtactgggattggggagtacacggtgtttaagtaaagacggggatggttatgggtttagcctaaggtggtctagatacagtaaaacacaaaacaaatatattatatcaagacagcctattttgtgctacaaaagaaagtctagaccggtagaagatggttaagaaatataccagtccagcggcgtctaagtaggcgtctcgatctatcacgctgggtgcatttgacaagtacggagtagatatggaccacaactggagctgtgtgatatggagagtcgccagcttccaaatagggagtagggcgtcactaagaagtgatagcacgattgagagagagctgacaggcacgaagctggcgcataaatgactggggttgccaatagcggcgcagatcgggggctcccgggagaagattaattgacaaatatagaaaaggaccaggggaaaacataatagggtaagggtatttccagtactgagatgtataataccgaaatacagatcaaatcccagtcgagaaaggtcggaaatcttgatctttctgggatctctttgatgtcatgtgtgatcacgggacgacgcattagtttcgtggctttgtttaccggaggttttacgcgccatcaacaatcaacaaggtcgtgacatcacattggacaataagaggggaaaatgtccaagagcacggaggggaaaaaggcctagacaacaaccatgcaggtgtatctggcaggacacgagttgaaatgtgatgaaccccgcagcgaccaaggctgtcggctggagagctgacatgactggccccatcgcacatggcgctgtgatgcaattgaccggtcacatcatcggggtcctctccgaccccaccttagctgcgactctgcgtggcgcagagagacagatcgggttgggctgatacagtcagcccagagggtttccatccgcaagcgcctgagaaagtgaaatgttttgtgattcgtgaagatgtgttcgagtgttatcacatcaaaacatggcgcaacacagcacaaccatcgatgcgatccgacctctcaggattcaagatttcaaaagttttcaaggcctgagtcttcgacttccaaggttcattagtatcttactaggacatcatcgaagtgcacggagcactgtcatgttcaggagatatgacgtagcatcacgggccaataaaattatccgaacgcgtcgtggattttgcacaccgcatcgtctgccaccggggagaggtgtgtaacaatgcctttgataaatgcagaaggcaactgtaaatattgaaaagacccgttgatgcatttcggattgaccggatatcccatgacccagtgaagctcgttccggtgtttcacggagagggtccagaatagcacaccgtggggtgcagtagtgaatcctgagagtgtccaccagagcactatgactggatgactagagccgacttcagcgactagtagtttcgaaaatactccggatatactttgtacaaagtaaaaaagccgatggtggcgaatctgagatcttgctggatactccatagtaaacataaacatcgcatctgatagcctgaatgagacgcgacctctactccgtatgttgtactaaatctgtgttaataaacttgtttaaggtgtgaacgaaccatggtctcaacaattgcgtcaatcgcatgaatcattaccccggctcatccttactgctgttagtagtagccctaactccggagtgaggttaattcaattacttcggtgaggttggaagaagcatatcgaatgtcatcagacaggaaggtttcaatagccctacccttgggcaattaatgtatattgaaggtcaaacaccctaccaaggggcatggaagggatgcgggacattgaaggtcatcgcgagcccttgatcaacaagaatgtcggtacaagtaagggcaggacgggtatgtatgagcggaatactatagcgtcttcgattgtgagaggaagaatgggattatctaccattccttactcgatactacgttgtacgttccgatcttgaagcaattgaacggcaatttactccggagtccgtcgttcgtccagtatcccacattgtacggaattactccataccccgtacaacatggacagattccaatctctgatcggctcttgatatcccctaatagggccaagatagtgtgaactctttttgcatttcggagatgaagagatcttgaaataccacggtctctccgatgcggccaatcaatacctcggtaagacgatcacagggcttcttaatcggactagttgagtcgatcggagcactatattgcactataattgtgaatccattctttcaagtgaaggggattcttcgaattgaagcatatcgtgacgttggagaccaatgaagaagacgccgttcaatcgtagcacccttgcttcccatgacttgcttcccatcacttgcaggaagctttaaattttttttttctcccgagaacaggaaaagtggatattttgcattgaactcgatctcttttgggtcccgtttttttttttttttttttttttttttcagctcacctgtggttgacacgggaaagaaaaagttttttggtggatacgatgcgtaagaaggaagatggaacagtacctaggtacctaggtaggctccgaggaaatctgacataagcatacagcgtatggcgtatagcgtataatagagagacaatcctccttccattgagcaggggagacaaagctaaacccaagacattattgtactggagcacggagtacttagccctagaggtagactgaggtcgtctctctgagagaagctgtgataggcgctgggttgctgcggcaagggagccccgggcaaccaaaaagtatttggcccctagagaagtgtctatcctttactctctacggttaactactatggcataccgatcttggaaattataatgtattttattcctttattcttttattctttatttctttttttaattggcattttaccatacagcgcttataaaggaagttttaactatacatacctactacaataattactccatattacgtctattaccctcttaatacagactctccccgtctttccctattatttcaatatttaataaaatttcccgattacatgaaaatcggagccgcagtatttctcaatacttcaatacttgtacattcggagatcctccccacctgcgttgcccattgcaacaagcccatcccttcagcttcacttctttcttctttgttcctacttcttcttgttcttcttcttcttcttaattactcacgacattcctcccgacattgagaggaacaactttgttaatcggttctgtccgccgacaatccatatcatattgttggaccttcccctcagtcctgcagcacccacgagctcccccgacccctccaatcacaaccgacagactcaccatattcaccatattcaccccctccaaaaaaacctccgaagtcttgccatggaccgataaatcctgtgacttaacgaaatacaactctcgtcgttggtggttagggtctgggacctaggtttttttttttcttcccggaaactggttgtcacggcgatcgtggggacccataacgttgaaattgcaaacgtggagacgtgcgttgagaccacttttttttctttttgaagctcggtttgtaggacctagtactgggtagacacctatggtcagggcctgattgcctttccatctgttccggttgctttcccagaaaactgtacaacgtcggcttcttggtccagtcgcagcaccatggagcactcttcacctctcgctgctatgcaacctccgtcagtcatgttcggccattgctttcgttccgaagcaccgacttcttattctttgggttcaatgtccgggtttggtgggaacccgttcaatttcaaggaattgtctatgaagaagtctagctcggactacttcaacgtgaaacccattcgaggttcttctcccacagccagtttggctgctgatctttctcagaacttccatatcgatcaaaggtatgtggagatttccatgggcgtttcatgaagttcaaagggacaaagcccggctaactctatatttagtccccaattagccacaccacgccggtctttgttcacggccagtatgctcggtcaagccaatggacgtggtaagcaatggcatcaatggcacagaagggcagggcggagtagttactgataccttatatatatagatgatgtgatgaccaccccgccgctcccatcatcttcaccagcgccagctatggacgttatggaaatgtctccgctacctcacaagccggccttctttgtcaccgccgagatcgaggtacagtctccgacacctgggggtagtcccatggaatcaccaatggtgtctccgctcccgagtcctctacaagcgtctccgatggagtctcctctatgcccgcctgagtaagtgcacgtgagagtcaacccactcaaatcagtaccgctaacatgaattcctatcggacaggaggaagcggcccactttcctgcgtcccagtctggcgaggagtaaggctcagtcttaccaacttggactgacccggccttcaccggagagtaaagcacctcccttccgatttggaactggagcgaagacgtctcttagcacctccacttctctggaggatatgtttggggactcgcctccccgtgagcgtccgatctcgcgcaacaattcttcaactcacctggcgccgcctcggatgcggccatcactccaccatgctcgtagcagcggctcgcccgcccacagttcaatccgcaaaccgtctcaccctttgatgcgtccgcgcaagcaatgccggcggtcattgagcatgtttgagaacccggcagatgttattgccgataaagaggccaaggtagcaacaaatacacccctccagtccatcagtgacatttcaagtccgcccagcatgaagctgcctcacttcatccctgaggatcgcgcggactctctgcctcgcatcgacaaaagcactcttctggaactcatggatggcaaattcaatgaccagttcgacaacattctcatcatcgactgccgcttcgagtacgagtatgaggggggtcacatcactggcgcattgaactataatgacaaggaacgtctcgccggtgaactcttcagtgcccctcaggcccgcactgcgcttatcctacactgcgagtactctgcccaccgggctcccatcatggccaagtacctgcgacaccatgatcgcgccatcaatgttgatacgtaccctaacctgtcataccccgatatgtacattctggatggtggatacagctcattctttgctgagcaccgctctctctgttaccctcagaactatgtcgagatgagtgccaaggagcatgaatttgcctgcgagcgtggacttggcaaggtcaagcagcgctccaagctgaatcgtgcccagacttttgcctttggtgaacaatcaccccaaatggaggacagcccaactggacgttgccgacttggcgacaacgagcgtaaccgctacttaagctctccattttctcaaagcccagtccctgcccggacccccggccgccggatgctttcctactagatcgactagtaccgttcctttttggtgctttgcattatcttgcatcttgcatcttgtccttttccttttctatctttttccctgcgtcttgtccttggagcgtggtgtttggctgatgcattccaagatgctttatggcggctttttcttttcttttcaccctcaatttctctcgaccttttcagtcctgccgaggtctgatttgcggtggcgtgctgaatcacctgcgctattcaccttttccctcatctctttgatatctgctctcagtatcgtcctctctttgactcaccctgtttagctgggttcctgcctccaatatttcctttgcgtggcatcttgccacatctctctatgaccgtcgcccatgatcttcctgggtaatcgactctcatgacccatacgaatctgagtgtcccatttcatatgtctatttacgacctcgcaacttcgcaaaagtgcgcacgaagacgtcctcggcctatcatcgccaggtttccgatttctcatatctcttccgtgggaccttttttttccccccgcgacaacaataccccccaatgacgattttcatcgaacatttcgccgacactttggcatctccttttctccccgaacattctttttgacaccattatcgccctttaatccactatttggtccttcctgtacagactttctactgtggattaatcgtcattccacgctgtaccaaatttgcatctcgatgctcaacgccagtctcttgacttcttcgcctggagcatttgtattttcaattgtccgataatatcaccctttgaaccgtgtcattgggtagtgcggaggatctggatgtaatatttgcatcgagagtgactttttacagctgtacataacgagaattgccgtattacatgcaatttctctcctggacgtgttttcctgagattttaatggtctggaaagggtaatcggaggagacaaccagtttacaaatgtttgatttccctttgtgagaatgaaagaaaaaaaatgaaaaaaattcaaagatttcaaaataacttcaagtcttttgtaaaagccaaaagagaagaaagaaaaaggaaaaatgccaactgatcgacagaatagattaatgaggattgtcgtttcaagtctctctgctgaatgtgataggcgggaagcgggggggaactatggggttctgtcctgtccttctccctcgaactgcttcaacttcattctcttctctccttccaaaggctcattctccaatttggcggtttggctgtttcagccattttgagacttatcgtttcattccttggaagtattctagggcttcactctctctccagtttttatttttattctttttatattcaatgttctattttggtaacttgctgcctgttcgatcgaccatcttgaactagcatctatttcgtacgttacgtacactgcgtacatcttcgctgatattgaatctattgtgtgactccgcatccactccattatcgctataactcggacgccccctctcgctaactccgagcccggcacaatttgtacatctcatacgcgctacaattcaaactggactgcgtctaattccaatccagttggttcggaaaatcttgcccaaggctgtttcgcagccattggcaatcggatgattcccttcctatcgcattgcgcatccactattcatttccaagatgagtccagcaaacattacactatgggctcgaggtaccgcgagtgatctcgagtcggttccagacaccttttcgagctgggataaatgtatggccaaatcgtactgcaagtgagttcttcctaagggatgcgcgccctcccttccccatttgcgcatgatctggcatgatactaattaattggcgcaaaaggtggcccgtcatcgtcggtataatcgttggttcggtagttctactggccgtactagcttgcatcatcaattgcctctgttgcggctatcaatgctgcaagtgctgttgtagctgttgttgtccgtcaggcaggcgcagaaacaaaacgcctaaacactttgacgacttccaccaacctccaccagctcccaatcctgtctatcaaccgccaccagccccaccctcatatcgtggtgcgcaacagagcgcgccctccttccgcggcgcgcagcagactgcgcatttcgatgcgcctaagtctccggctcatgtcaatgaggacgccctgcctgagatgcctacctgggctggtgccgttgacaagcatgttgaagacccaaatcatcgcgacgatgttgaaatggagccattgaatcccccggaccgaaaacagaccggcacacctggtgtcgcttactctgactattcacccaacccaaccatgggggcggccgcggcgggatacagaggatttgggcctaccgatccgcgtgcacgccggtctcccggtccgggagcggcattgaatcccgtccaagatccgtatggccgacgttcgccgggcacaccctcccccgggggagccattgatccctatgggagaagatccccgggcccagcggcactaggtgctgcccaggatccatacagccgacgttcccccggcccagcagcgttggctgccactcaagatccgtacgggcgccgctcacctggcatgtcaccggccccagcagctggctatggcgccgcagcccacgatccctacggaccgcgctctccgggcgtgacatcgcctgtcggcgcaccagttcacaacccttacgaccagcaacaataccaaggctcctacgatgaccattcctatggcgcaggcaatggttaccacgccgtggccgcaccctcgcccgtggctgcatacaagccgcacaccaattacagccccgtgccaatggccttctctccatcctcggagatagaccattccgcagccgcagctccgacaccaggcttccagcgccagccatctttcggctctagccagtatcccccaacctacacctcccagcctccataccgcggcttctcccccgctccttcttcgccccctcctgccttctcggctgcttcgccctcagagtacgctacctataacccccacgccaacaccatccccattcccgagcccgacaacaccaggcctccgagtctgttgcagagcggtaaaaagcctaccgtcaacgcttctagcaacttttgagtatgatcctcgtcgatcgaggccgtttcatgaacaggacgttttatttatttttctcttcttctcgttgtacctttttgataccattcttacgccatattcgtctttcatcttacatacttaccttgaccccggactaaatttgggcttgaaattaaaggtttccttttcttccgttatttccaccacttgaactcttttgtatcctggagtcagccttgtctgactcgttcggtactcctggatggcagccttttcgggatgatgcgcatttttttgtagcggaaatgacccaccctttggttcgccgtagaatttatgatattcagagctttgagggtttccagattgttggattgggatattgtcgggtttataccatggatacatacctagtagatgaaaataacagggtatggccatctgactgtcctcgagctaggacccatgtatccagcctttagtgtcgaggggatcacgatctggggataggagtttcagactgcgattggatgctcaacggacatcttgtcattgaaaatccgagcatagcccaaggggttgccatcgctaggaatcttgggagcattgtcgggacctctttcttgatgttttccatttctgaccggaacagcctgggaagacgcgttaatatgacctatctcttatgtgcccccatggaaatctgtaattgtgaattttggcttcaaatttggactcatttgtcacatttcatcgtattgtacacggacaggtagctctccgaagatgctccccgtcgaaagattcctcaccataccacgcacacttgccatgtatgacccctggaaaagaagaagaaacttgctgatctcaaattcattcctcaatctccatcgcgaaatcatgtttcttgaaagcctccttgaaagcctctgcatccttcgtctcctcgtcgtccgtctgcacacaatccctccagttaatacgctcatccagatagagcaccttacccataacccgacgaccaaattgcaaatcaaatcggttctcgggcagaattttcatgatgataacattctcttctccggattcagtcttccaaacgcctgtgtgctcaggtgcagaccaatggtcgcctttggtttcggcttcgctgctgggcgtaggcgtccaaatgaagactcggaaataatcgatcatatggtggttgtggatttcgtcggggcttggaacggtcttgaacgtcgaatattccaggttcgaggcttccttcttgaatgccatttccacaagtcgggagcggatcttttccactggcatgggcaggaattgccaatgtgtgtggataccgtttgagcggctgacttcccaggtgacagcacctagcttgcctcctgatctctcattcagcatttggtgtagggattcgcggtaccgttgcatctcggcgaaagtcgaggcgcggatggccgggtcgaagattaggtcgatggtcggggagtgttcgaaggggattatgagcatatggcctgggaagcctagggaagggtagaagttggttgtgggcagaggtcctttggcggtggtgacgtagctgtcattgccgattgaggtgatgagatgggtggcgatgttggggttcgagaggcagaagaaacagttctctgggcctggcggaggggcgcgttgtttatggcggcgttgatgtcccgggtccctatcttggtcagagggggcgtagcgctggtatgattcgctctggcttgggagcattttgcgcctgctttgcaccgctgaccaagggcaaatggtggagcctgtggggatactgcttgggaaaggtgccgttgggtccaaggtaaaggcataaatagcatttttcgacgagccgaaagtaggcaatgagatgaaccgagtgagcgggtagacatcttcacctccctccgttggcatgtgaaagaagggttcacgctcgaagaaagcaccatctgaccgagagaagtgataccggggtttcagagtcgcgcagacatcagcaatgcattgtaattcagatggcacggtctccttatccccagagacctcgcagctagatcctagacggacatccttcggccattgattggtgataagaatgtcggttttgtgaatcccaaacagtgcacgagcatcggattcactgtaggtcggttggaacttgccactagcattgctctcgggtttggatctaccctctgtcgcttccatggtgccaccgagggcaacaatacgaataccatctgttgtcttcaaggttcccctcttccccaggaagaacaagttggggcacacttcatcagttgcttcaatcttttcgaccacttgagggggaagtggtcggtcaccaagggtgaagtaggttgggcatgccacggtgatgttcccctgtagcaaggcgttaatatcttcgagctcattttcagtcgagccatcaccgaagaggtcgccaagaatgatcgcaaaggagaaatcctgttttagctgcagcttggctagcttggtgaacacgggccgtatctgaccgttcaagctgccaatgacaatactacatatgaattgggttagtgactggaatacgggcggatctgaacatacataccatttgggagccatttttggatctgtcttgatggtagattgaattggtagaggaaaatgctgaaaattttgatggaaagttgataaaacggcggtgggaaagatgggaaataggaagatgaaagatccccaagagtatgagattcttccaaatgcccaaactgtctggatgtgccaccagagatcagctacatgcgactagtcgcaggatagaacatcttcgggttctcgaaagcaggagcttgggccaccttatcagcacgtgatatacatagatatctgccccggaataagaaaatcccgctccgaagaacttttttgtattccatgcggatcagccaaaaagaaaagtgaccagtacctttctcacgaacagtgctgctcgtcagacccgtcaagatggtggggacaggctcaaaatcaaagcctgtacggcgcctgaaaacgggcacagaaaccacgaaaaatcaccgattcgagggcttttcatcacgcatcagcaagctcaaaatcgacccgatccaccgcgtgcgccgcgccagtttcggcgaagatgaagacgaaacatcttcttatttccgagcggccctcgatcattggttcgaaatgaacctttcagacaactttacacaattcgtacggcatgtcaaccctctttccgagagctttgcgcaagttctgtatcatgaagaaaagattatgggcctattggtggaattcatcgagaagagagaccagctctctatggagccgcttttgagcttgcttgcgcaatttgctcgggatctgggcgtcaagttcgaaaaacattttgctacggcggtgacactggtgtcatccgttgcagcgacacatcccgatattgaggtcgttgaatggagtttcacttgtcttgcatggatctttaaattcctttcccgtctgttggtaccggatctgcgacagctgctgggtatcatgactccatatctcgggaaagaacgacaaaagccatttgtggcgaggttcgccgctgaatcgatgtcgtttcttatcagaaaggctggcctggtttattacaaaaacaaagcacccctcgagactgccgtctcattcctcttcgatgatatctcgaatgccgccgatgacaacaaggatactgaaaactacagggaaggattgatgaccatgttctctgatgctatcaggggagtcaacaacgggcttcactccaacggcatggatatcctaaattgtgttctaagtcagatcccgccgactagcgaaaaccacaatgaccctgcagaagttatatttggtctggtcgtcagtcttgtccacgccacgactcccgacaccttcggacccgttctcgacacggtcaaggcttatattgaagatcgttcaaaatctgccccgaatcctaatctctcagagtgctgccgtataatgttgctgattgtgacaactcgcaagggtgtcagaatccaaaactggaagactgttcatcaaatccaagtgtccctgctccagcaggtgtcggcatctgatgtctcatcagcaacgatatcacagatccttacaagcgtcgcatacgcccttcagatgtcccccatggacgagttgctacctttccttcgccctatcatggacctggtgtctacaggccagctttccaaatacttcttattcttctgcgcaacattctctgagtggggatcggagcgattccagagcttggttctttcccctttccaaaagtttatcaactcatcatggcaaaagtcagagtgggagacttgtttcaccctgctacgcctgcatgaggctggttgcatcacgcccgagacctcacaacctggctacgtttcctgcccagatgccttcaaatctcgcatcactgattcattggagtaccccacgaaagatgaagcctttttgaatgcgctggtgaagcttccaggcgctatctctttgtttgcagattctgttacaatgtccaatattgtttccaagttgcacgataacctcctatcagcgttccaagatggtgcagctgaaggcaatgacgcccagacgaagggcctggtgtttttccttggtcaagggttcaaaacctatgtcgaactcgccaacaaagttggagagcttgactcgggcctcttgaaactgatcattgccactgctacaaaattctcccgcctcccagtctttttggagggtgcccttgctttcatttcctctctcccagtggcagccgagcttgaacaccccactctggaagactttgctcaggacttgattgtgaacctggcaagcccgtcgcacaggctgagactggtatctcttcggattctacgggagttaatcgctcgcattgccaaagatgacccctcgcccgtggagttggccattgaagtcgaagagagtccactgacaatggactccgtgaggaccatctctatgcatatccgcaaacttgcgattctctacccccaaattgctcaccgcagatggatggccaccttggtcccttacttttgcttcggattgttctcgaagaagttggctccattgtgggatgactctgctgctgcattgaagactatttgcgaaaatcctgagggtgagaagattgtgtccgatttgtctatccagtggctgtcagagcgggataccgaagcgcccagcgacactccaacagaagatgatgaaagctctttcgtcaagagcaacttcaagtgttacaacgttgcgaaggtcgaaaaaatactcgccgcgaataccaagaacaccgaggatccgtatcatgtactatctcagcaattcaaacaggaccacaccgtcgcagacatccttcccgcttgcccacgaacccatgcacttcgtgtcttgaacgctgcaccgggcgttgctgagaaacgctcgcgccagattgtgccattgttcttgtcctgggcattgcgtgaggaccaagatgacgcgcccccaactggcgagaccaaggtcgaagatgctaagtctggtgatgagcaagtacgttggggattccgggatcgattgtccatgcttgctttgttcgcgcgattcctcaaccccattgtcttgtttaaagcacccgaggttcatgcggcagtcctgggacttctgagccatggtaactctgacctgcagaaacatgctctcaaagtcctcttcacctggaaagatccgaatgtgcgcccgtatcaggaaaacctgcttaatctcttggatgaggccaggttcaaggatgagcttgctgtcttcgtacatgttggcgacgaagatagcctaattcaacaagagcaccgtgctgttctccttcccgtggtccttcgactactctatggtcgaatgatttctaaggctggctcggccgccgctggccaagccggcagacgaaagaccatccttcgaactatctcgcacctctcagagcacgacttcggtcttttcatgcagctttcttttggccctcttgcaaacgtgcacgttgtcaaagacaacaatgagtgcgatccgactgccttccaagaagagttgacaagcccaagaagacagctgggtctgcttaagctgattgatactgtctttgagaccctccaaacccgtatgactgaatttgcatcgcagacgatggatgtagttgtctactgtttggtgcgagcatgccgggcgatttacaacgagggtagcgatcgtccagatgaacgcctcttgcctgtactccaaaatattcgttcggcgtgtattcgctgtctcaatttggtcttctcgattgtcccgaaccatgattgggctccctacgttcgtatcatcttcaaggagatgattgacagcagattggatcagttccctattgagacagcgcagggtgtttcaggccttctgcgattgttctccacttgggctgctgccccacggtcaacattctacttggtgcagcacaatgacaaagtcttgactaaggtaattgactgtctcgcggttgagtctgcccgcgacgaagtcaagaactttatcttggacgaggttctcatgccgttggttgagcagtctacgggcaaaaaattgcaggaaactgaagagatgcctgacttcccagctgagcaaattaaatccgaagtcctctctccttacctggagcatgctctcttccatctcggtcgtcttctcaagagaggcccctcgaagcccgttctttactccggagtcaacgctctttccctaatcgccccttgcgtcgaatcttccaaagagaccgccagtcttatcgggattacaacatatctgcttcgtcagcctgtggatcgtgtcagcccgagaaccaagtctggtttattgaaaatcctcgaacactttttgcccttgtgggatcccaaagaagatgccgagcttgcccaacaagtgtttgatgcggtgtgctccatgttcgattacttcaaggatgatgcgaacagagaagtattggcccgggtgtttagtgcttttgctatccacgacgagaacctcaagattgttgccgaattatgtgcagatctaaactctcgctcaactacaagactcgaacccgattatgcgagacgattgcaggctttcagaatagtcagcgacgaactatctcagactttgagcgcgaagcagtggaaacctcttctctataacatgcttttccatttgagggatgaagatgagcttgctattcgatctagcgcctcctttggtctaagacgatttattgacagagcgtccacggaaccagacgcagactttgaggcactcatcaatgatgttctgtttccctctcttcaatacggcatccgacagaagtctgaacttattcgctctgaagttgtcgctgtcattggctacttcgtcaaactcaaccccaccagaccatccgtgcaggacatgcacgtccttctcgtcggtgatgatgaggaggcctctttcttcaccaacattcttcacatccaacagcaccgccggcaacgtgcattgcggcgtctggctggagatgcagctcaaggcagcattcaggctacaaacctgggcaccattttcattcccctcattgagcatttcattttcgaggatgctgctgatgaaaacgcccacaacctgattgccgaaggtgttgcaacacttggtgttctctcagaatggctggaatggggccagttccgagcaaacttccggaggtaccgcagttatatgacaagcaagcctgaaaaggagaagaacatcctcagactgctgggccgcatgtctgacgcgctgtctagtgcaatgagtcgaaagaaggggacggagaaccagactgatggtgaggtcgataagatggatattgttgagcagcccatgtgcacgctcgccaagactgttccttctcttacgaaggtttcaacggaattgaccacaaacttcattcctttcctgacgaactacatccaccacaagcaggagaaggagatgagtatgcgtctgcccgcttcgattaccactgtcaagcttctcaagatcctccccgaagaagaactggctattcgtctcccgccagtcctgctggacgtatgcacaaccctcaagagcaaagcacaggattcccgtgacaccgcacggaaaacgctcaacgagctcgctcttcttttgggtcctgtctatttcggctatatcctcaaagaacttcgcaacgttctcgcccgaggttatcagcttcacgttctctcattcaccgttcattccatgcttgtgaccaccactgatcacttcaagcaaggagatctggattactgtttgaaagaactggttgcggttgtgatggacgatacatttggcacagtcggccaagaaaaggacgctgaaggatacaccagcaaaatgcaggaagtcaagagcagcaagagctatgactctatggagctccttgctaaggtctcaactatcagccaattgtcaaatctgattaggcctctgcaggcactcctatgtgaaaagctcaattcgaagctagtcaacaagcttgatgagctcatgcgaagaattgccatcggtcttctgagaaatcctgacgccgaaagtcgcgatatgttggtcttctgttacgaggtcatcaaagaggcctaccgagacaatgccccagatgcaggcccggctgcgcccaagaccaggtacgaggagcggttcttagtccgattgcaaggagccaagcggggcgagcacagaggtgcaacatcttctcatgtttacaagttgacccggttctcgctggatgtgcttcgtgctatcctcaacaagtttaattcgttgttgacagcttctaacttgtcgggcttcattcccatcattggtgatgcgcttgttcagtctcacgaggaagtgaaggtttctgctctccgtttgctctccacgattatcaagcttccgctgccagagattgacgagaattcacacgtctatttcaccgaagcagtaaaacttgttaaggagtctcctagcaccaactccgaagcggcacaggcctccctgaagttgatttcttccatgttgcgtgaacgaaaggacaccaagctccgtgacgggcatcttgcatacttgctcaagcgtctggcctccgacatcgaggagccagatcgccaaggtgtgactttcaacttcatccgcgcagtcatgtcccggaaactcatcgttcccgagatgtatgagcttatggacaacatcgccactatgatggtgacgaaccaaactcgctctgcccgggatcttgctcgcggtacctacattcatttcctgatcgagtacccgcaggcaaagagtcgctggaacaaacagctcgctttctttgcgaagaatctggactacaagcatcagtccggacggcagtcagttatggaggcgatgcacgcgctcctttcaaagaccggcccagaattagcacaggatatcatcagcaccttctttctgcctatcgtccttgctatggcgaacgacgagtcgccggaatgccgtgagttggctggtgcattgctaggagagttcttcaaccgtgcggatcgggagcagatgaagactatccttactccccttcggtcgtggttggagcagaccgacaacatggctctatgcagtattggattgcaggccatgcggatctacttcgaggccgagcagaccgagaaggacaaacaggctcgtttcgttatcgacatcctccccggcttgatgcagcccgttcttgatgaccatgagaatggcaattgggaagctctttactatgccctgcaacttttcacaaagctttgcaaatcggcttccccgcttgctctgagcccggaatgcgcttctatctggacttccgtccaagagtgcttgttcttcccccacgcgtgggtcaagacctgtgctgcaaatcttgtaggcctgtggatggctgatctggccaagacaaatgccgctgctggttacgcttccctacctctgactggaagttccggtctcgccatggacaagccggccatgctgcaacttcttcgtgctagtctccgcagtctacgtacccctggcattgccgaggaacttgctatgcagagtgtacgcaacactgtctttcttggacgttgctgctcccaaaacggactcgaacttccgaaactggcaggtgaggatgttgaatccgaagacgaggacgaggatgaggatgctggcagtggagctgagggagaggcaaaggaggaagccaaggtggaatacaacagatctgcgattcattacatcttcaagcaggtctcctcccttttgcggcgggaaactatctccggccgagcgaacgctctcgtccccaagacagcttccatcacactccttgccgcgctcatccgccacatcgaggttgaacagatccgtccttctctgcgcgtcatcctcattcccctacagcatctgacggatccatccatcccggcgccacgctcatcggatgagaccttccagaacacgtacaagtctctcgtctccaactgccacgaggtcttggatctcctccagaagaaactcggcaccaccgaatacgtggagcatatttctagggtccaggcggctatcaaggaacgtcgtgaaggacgacgggccaagcgtcgcatcgacgccgttgctgaccctgagaagcacggacgtgataagatgaagaagaacgagcggaagagagacaagcgccgtgagaagggcttggagcaccgtggaaagagacggggctggtagaggatctgacatctattcgcatgtctcatgaaatggtgttattggcatacaaaaaattcaggcgttttggtgggatggattacttatattatacttgcattgtatataccttctcagaacaatttgatttttctgtacagaccttgtgttttctcaatatgtgtagactttctgagttatgaaattaaggtagtcgactaatttctaatgtacaaattccccaatatattccttttctcgatgcttggatcctgccatgctgagtagagagttttccatcgccataatatacacgcccaagaccaaacaaaaacacctgatatgcatcaaatccacaaagaatctatggaatctatgtaggaacctcactttcactcgctttcacttcaaatgaactcaagccgacttatcatcattgcgtgctcccaggatctccttaccctccaggtcataactcttcacagacccatcctcccagaattccaagttgccatccgtatgtccatgggtcaatgtctgacccttctccttcaacagatcttccagggttgtcttcttttcgaagaagacaccaaggtgatcactcatgacatggcgcgagtcacatgagggacactggataaggacagttccacggtggtagccttgcttggacatgcgatgcgcagagcgatgaccacacggcttgcaggtgaatgtaatgcggtaggcttcctcgttcttgcgacgctcctggttctgtgcttcccattcagcctcttgctccgcctggcttttcggtgattcagtgagagggcgaggagcgtgggagttgtatcgcagctgggtctgggcaaggatacgctgcgattgagggagaatagatgacgggcgagctgagcgtagagatgggaattgtgtcgagaggaagcgtgaggattgtgcgcgtgcaatagtagtggatgattgtgcttgcgacacaagagcattcaatgggcggagacccgaggtgaaagagcgcatggtgatagtgtgtgtagaggtatacaggtatttagaatccgagaaagaacttcaaaagatatagagaaatttgcaaggcaaaagggagactattcggatggaaaagaaaatcactgaaatgacgatgctcggtcagcgacagacggaactttagaatttccggggttggcctccgcggagagaagagcgcagttcttcttcgacctttttttttttttctccttgggttctctatttactcactttctcttggttttactgtggccttcaatatggcagcaatgagggctcgtcacaagattcgagctccccgaagggttcgttgagcggcggggtcaatactatgaagctatccgctaactagttatacttctagggagtctcccatgccaataccgaagatttcgactctatatggacggtgctctcatcatcgttgactgaaattaataccaaaaatgcctcgaccctggcattcgaagagatctaccgtcatgcctacaagatcgtgttgatgatgcgggctcctgatctctacgaacaagtcaagcaactggagcaggactggctgaaaaccaacgtccgaaccctcgttactgattcaatttcttcgagcctagtgcgggcgcaaaaatccaccgatgcgcaggaccagtcgagtgagaggagggaggcgggggagaagttcctcactgtcttgaaggatgcttgggaagatcatcaattgggcatgggcatggttaccgatgttcttatgtacatggtgagttcttttacactctatggtatttctataatgctctaacttcctgcgcaggaccgtatggtagcaagccgtactcacccacccatctacgttgcctgcatggctctattccgagaccatatcttacgagcccccgtccgtgccggctccgctttgactgtcatggatctgctcgaatccaccatactgttcatgatccaactggaacgttctggccacatcattgagcggcccctcattcggcattgcatacaaatgttggagggcctctacgaaactgcaacagaggaggaaagttcaaagctatatctaaccgagtttgaaccagcctttctcgaaacgagtaaggagttctaccaagcagaagggcaacggctgttggaaataggagacgctgccacgttttgccgactcgcgacccaacggatcactgaagaagaagagcgatgccgctatatgttgtcggccacaacagagcctaaggtcctggagttgcttgacgagcagctgatccggagcaatattgacgaagtcgtcaatctcaagggaactggtgtccgacgcatgctggatcacgatcagttggaagggctacggaatgtttacatgctcaataaaagagtcgacaaaaagaagcaagctttgacgaacatggtcaacaaacggattgtggaaatgggcaaagaaatcaatgcttcgtctatactcttaccgcaagccccagggcagtcggcagacaaagatggcgaaaaagagaaaaagcccgagaagggcaaagataaggaaaagcctcagaatcagcaaacagtgtcagcaatccgctgggtcgacgacatccttggcctcaagcggaaattcgataacatttgggagaacgccttcgcctccgaccagggcatgcaaggctcaatcggagccagctttgccaacttcatcaacatgaatgtacggaactctgagtatctgtctctcttcttcgatgaaaacttgaagaagggcattaagggaaagacagaaagcgaggtagatgttctcctggacaatggtatcacattgttgcgctacatcaaggacaaggatctatttgagacttattataagaaacatctatcacgccgtcttcttatgaaacgctctgtcagcatggatgcagagagacagatgatctccaagatgaaattggaggtcggtaaccagttcacccaacgcattgagtctatgttcaaggacatgaccatttcggaagatcttaccaccagttacaaggaacacattgcgcgcagtggtgaccctgaccagaaacccgtggacctggagatcaacgttctcactagtaccatgtggccgatggaaataatggcaagcaaagagggaatggtccaattgccttgcattttcccacgggagattgacacactgaagcaaagctttgagaggttttatctcgacaagcacagcggccgtaaactgtcgtggcaagctagcatgggcactggcgatcttcgagccactttcgtacgttccaatggcaaagtccagcgttatgaactcaacgtgtcaacatatgccatggtcatcctgttattattcaacgacatcccagacggcgaagccctcacctatgtcgaaatcaaaagccgcacccggatccaagaccacgacctaacccgcaacttgcaatcgctcgccgttgccccaaagacccgggttttgaagaaagaccctatgagcaaggatgtgaagcccacggaccgtttccttttcaaccatgatttccagagcccctttgtgaaagtgcgtatcggagttgtcagcggcggtgcgaacaaggtcgagaaccaagatcaacgcaaggtcactgaaaagaagatgaatgatgagcgcaacggtacgatcgaagctgccatcgtccgcattatgaagtatgtccctttctccatatatatccctatatgatctgacagactaacctttggcacagacaacgcaaaacgcttactcattctcaactaatgactgagactctttcgcaactctccgctcgctttgttccagacgtgaacatgatcaagcgtcggattgagagtctgattgaccgcgaatacctggagcgagtctcggaagagccacccacctatggatatgtcgcataaagtcagactatctcggtgatctggactcatttgctctggcttgttatgattttatgatctggggtgtcctcgcatctcggtgtttgtgttttcaggagctttgcgtttctctgagcttagcgattggcgtcttttttaagggattgaaagaaatgaaatgtccgtagaaacccatctgatttgatattttgtttactgaccaatgggaactgctttggcaggacatgcatagtatctctcaatctatctacattggtagaagcaaattcccatagaaataagaaaatatatcataaaataacccaaacgccactccgctatgatgaagtcgaatatcaaaccccagtcccaaaaagaaaagcaaagactcgaaagaatcataataattcaacctcccctctcccccaagcccctttaaccccttcccatctgacaacccaaacatctcccatccgcatcgtaactcccgtctcatattcctcctcctccccaccaacaacaaccggaacctccgcaccaagacaccgaacaaaaacaacctccttcaaatcgggcccctggatcatactggtcccaccggcattatcatccaaccgcctcagctgccgcgggaatgcccccataaacgaccccgcgtagtggccagccagaagggtctggtgtgcatgcaagaacgacgtctccggctcggacagcggagcgagatccgtcagctctgatatatccggcacggagtcctcgggctgctggttggggttctgtgaggaggcggttgattgtgtttgcgaggcgagggggtttttgttgcgcgaggctagcagcactaggtagtgcatgctgtattttgttattttggcgagtcgggctcgtaaaagactgcgcactatgtattggctgcgggcgaggtcggtttggaggattgagaggcggaggttgaggttggggttgtgggtgtttgcggttgttgggagggttgtttctgacgacgcggctagatcttcgattgtttcgatctgtaggtgtcggattgtattagagatcgttctagggagtattgctatgtagctgctgtgtaggtgctgtgtgtacctgtatccgcacgcggtccattatgcgctccatcagtggcgccggccacggtagtacctccgacacggcgcgttcggctacccagaagcgcgtgagcaactggtggtccagcgctgcggactccagactggcacctggaccgcggtccactgacgcgagaatatcgtcgatatccatgaggttgtcgcattgaggaaaatgcagagcggagcgggaatatagggcggagatggggtgcctggggcactaatcagcccgctaatctcaaaatatcaatcgcaatacatgttcatgtacctgcgaggccggtttataagaattgagctgaattggcgagttcaactggcccaatctcaaagtatttgccaattggaccttttgctctgaaaccaggcgatcggcaaagcacacgatgccccagtgaatcgattagggccagtttactttgaaagagcaattctaatttgggttatttaattcaagtccatttggccgttcaagatgtacaagtatcattagagagaactgtacgagaaagaacctagaacttcataacccaagtcccatttttcagggatctcagacagactaaatgcttgaactcagctgaacttcagttagatatgacatggaagacacgaggaagcattaagtagtaggcgaaaaaaagaaaaaaccatccatccatccacccacgcgggtatgcgatcaaataaaaagaagaacatatttcgcaattgacaacgccgtaaaccattaccttccggcacatttatcgggatatatgcaacatcggaagaccttaaaaaccatgctcattaagctttgaaaagatgcgtatgagtttagtccttgcggccattgggcggtgggccaggtggcggcgcatatccgttggtaccgtacgcattcggaggctgctgcaactcgatgccttgctgctgtggtgatgcgttttgggcaccaaagtagccgtggtgctgagggttcgggctgtattgagggggcgcattttgctggtagtaagggtcgccgtagggaggttgttgatagatgggttggtttggcggaggaggtccggggggaggagccatccacccggttcctgtgatggggcgctggccatgatttcggcggcgacgtgcgttgaagcatctgaaacaaggcttgttaaaatcgagatcgaatggaagacaagatggggtaggactcacgcgaaactgaagaaaagtaggaaggctacaccgacgatcacggcgaacgctacccagcgaccccaagagtcccaggtagaatagcagtcattgccatgatagtaaccagagctgtgagggatcagcgatatgtcttttgacgggttatcacagtgtactcaccagtatcgagggtataggactggcatgaggggctaattatttgcgacagaagggataaattgggaaaaaagaaagaagaagaagaagaagaacccaatcttcaaggatgtgagatgttcgacgtcaatgggaggctggtgagagcggtgggtccttggcactttaggctgcagtttggggggaaaggtactgtgacttgcctggccgccttattttgtatggtgactgttgtaccagtacttacaattttgaatcaaatattttagaggagaactaaagagagtacagcagggtcattcgaattaaaaaggaaaaaggaaaagaaaaaagaaaagaaagaaaaagcaaagtgaaaaagaggaagactgcgtggcgcagttggggcagggctgacgcacgtgaacacatagtagtacgtatggagtatatacctaggtagttatagtccttataagtattatactattattctattactctattattctattattatatcttgtatatcatatcatattatactataaatatcaaataaaaattaaatacatgtgcatattcggtcttattctctataattctattgtctctattgagtcgagtgatgatgtactacactttcatagatatccctcaaccttgactagtcaatctagatgccacaatgtaatctttataataaagtcaacaattattaatatacgaagttcctaccattaagccgggacggatggcaaagccggtaacgcggtgatactcgaccggatttcacttttcaaatccaaactcgcctctctctcagccccattggtgtcttcgtgggtcatctgcaccgataaaacatggatccggggcgacatgtcgggtttggttttgaacgagtatgtaggtaatacctcgaacgtttcctgtacccaggacatctgcctgtccagatccggcccggagagactggtgtcgttgaccttattttcgagggtagtagaagacttggttcggaatacgctgctgggccaatctttcgccttggcaatcgggagtgtacagcatgcggttttggatacgctatcccaggcttcgaccacgcggtccgtcttgaggaactgggatatctgctccttcatggtctctcggccattcgtgagtcggtcgtgggcttcctgtcgcgcttgcatgggcgattgggctgtggattgtccagttcgcgggcgcggggtggtgcagaatgcccggagctgttctatggagatggtgcgtgagagtcgtgagggttgtgaaggtgctgttttcggtcgacattgagccgagttgattttctcgctggcagaccgtttgggtaggaagggcttggagagcttgcgtttgagccttccggatgtcgatggaaggggaggtggggcttcgttgccggcgcctgcgccggcttctgctataagagcactgcatgatttggcccgactcatgatcctgcgccgaatgccatcgcccaggatgggtggatccgcaggggtgtcggtttggtttttaactgtggcactctcaaactgcttggaggccgttggtgtccttgtcctctttggcttcgataatggatcccgaggaagaggcttttcggatgtgggccgttctttagcaaagagtctttgcttgaccgacttgtttcgattcacagtgttgttggtgtgtttaacaaacgatcgctgtgaccattagcgctggaatcggaaaatcaaggtctgtcaactcactacatccttcctactggctattcccacccgtcgttgcatttctgtagtcgccaagccaagttgggtcagggctttctgaagagcagtgccccgtcgacgaagttttgagattgcgacaatccagccctccatattgtccatcatggcctggtggaaagccttgaggctctcggacttgaagcagtccccgtccgtgagttcccggaagtagaaccacagtgcgcccatagcctcctttgccttttgtaggtccttcaggcagtctgtgacggccagggtgaatctttcaatggcatgttcaatctgatcattataggcgacaactgatagccggaaattccggtcctctagcatctcatcgaagacgtcaaggtttcccagcggtaggctgagatactgaattcgcgtgcgaacgtctagtcggatgatcaagaagtcttcggtggtcctttccaagaagccatccaactcattcacatgtttctgtagaatcttcatgactgaggcttcggattttgccaggctcttggctaagaggtggactccgaaagtcatttgggagatcaatttccaaaatggatggtacctgtatggttagttcagtccatccacttgataggagtacaacttctctcacttttcagaggccctttggcgccattttcgcccacaaagccgctcgtattcatcgttctctaataggtcccgtcggcgggtttgcgcgtcaatgtcaacgatccaattagttttagaacgatcggtcgtttcgataattgattcctcaaacgggccctggagttgggcaaggggatgggatgggtaaggactggatgttttctgagtgtccggttgcttctcaatatcgggcgtgtgaacaggagactccggcgtatccatgatctattacacgttcgcagtggcccgagtataagccgatgattgcacactttagagataaaatgccccaagttacaaattgaacgaaacttttgaagttttggtgtaatagcccctatccatttataaaatcacaattgcaaccagcccatggctttagtcatggtgaagatctggactgaggatggctggtgtagatatgcaaggtactactttatatgggattagagagagaaatcaatagaaaggtggaactgacttactttttttgaataggtccagtgaaacacatatatgtcaaaacagggagaagggtatcttatggcccctttgaacaaagagatgaaagagaggaaaatatgttggacatctttaatttctttaatttcttttcttttctttcttttttctttcttttttctttcttttttctttcttttttctttctttttttggttatgggggttattacgtggtggagggtccacgtcggcaacgtttccacttgacatcccccccaaatcagccaatgaccacccggcaatgtatcgaaattgaatcaaatcacaacaacttttgggagatcggagagtctgagaccacggcacttaatttcggatcaatggtttatccggttttagttcctagtatgtttccccttttacgaaagagacatcctctagggctctacggagtaccgagtagggctcatctacatgtattaggagacgtggcaaactacgagacttggcgtgatgtggtagggcatgaggtactccgtacaacgtagggcagttcgtgatagccttacactccatattgtacccgaacttcttattttatttctaaacgaaaggagggaatgggaaatgatatgcgagatcggcaactctagaagcggtccatttcgggacctgatacggagtacggaggacggagtatgtacactatgtacaacatagagatataatacgattgacttcaagtgcctcaggctttcacacattctgtataaacgtacaagtagcaacatcctatttacatagtgctacatgcactacgaccacgtaggacaatctatgcactaatatgcactaatatgcactaacatgcactagttatcatggatatttcccaaagttgggtactttgtttaatttgtttgcttgatttgcttgatttgtcttgtttgatcagtttgcatctacattacctggtgatttccccctcacttctctcgttctctctccatcgtctttgaattccaaaggttgcactgtttatttaaagaacacgaagtaatacatctaagcttttggtcagtcgacttcaaaactcaatttccaagtctactggtgttatagaccttcctacttaggaaagactcttggaacacaccttggtattgtcagcttggccgggactgccgcaacctagtcaggaagccaagctatcaaatcgtttactgtgactacaatctacagtccttctattgtcaagtacatccttccatctttcgcgtgatctcacactcacctagcctccaggctggaggtcattgataccagactcattatctactatcatggctctgggcgttatcgatgctaccgctactacatagattgttctgttaagcatgtcctgttcgaataagtactttaatagtatcttccaaaagaatcagaccgtaaacatatcacgtcatactgcgttgaaggatccttgtcttgttgcctaggaagtacaacgtacaacagctcttggccaattgagatgtctgctgtttagagacacagcccgcagggccgtacaactgtacagtctagcgacgatctttttcctcgttcaattcacgtcgaatccccgagtggagctttgactcttttcccctcttaaaaacgatgcgaccttcccccccggagctccaacggagatcgatgaaatccccggcttagttcccccaatagcgtgaaataattccttatcatggtttattttcccctcttctgggactataagtatccccaaataaccctgtaatcttcactcgtaacaagtaacccattatgcgtgtctcccactggattccattactgccggctgtagcggcgctcgtggtgccatcggaggatggttcggagagcttagaggcctttttccgccgccagctgcccgagcatccaacaggtgtgaagactatcaagacggctaataatgtcactattcgatataaagagcctggcaaagagggtgtttgtgaaaccaccccgggtgtcaactcttatgcgggttatgtggacctctctccaacagagcacactttcttctggttcttcgaggctcgccatgacccggaaaatgcgccaattaccctgtggttaaatggtggaccgggtagtgactccttgattggattgttcgaggaattgggtccctgtggtgtcaacgagcataatgaatcttatatcaacaagaactcgtggagtgaggtctccaatatgttattcatctctcagccactgggtgtcggtacgaatatctttctattctcctttcccttttcctatacatctggctcatataatcgcaggtttctcctacgccgaaaaagcccccggcacccttaatcccatcactggttcatatgaagacccttcatatgcaggtattgatggccgctatccagtcatcaacgccactgcaattgatacaactgtacttgctgccaaagctacctgggaagtcctgcagggattcctaggtggtcttcccaagctggactcgaagatcaagtcgaagagcttcaatctgtggactgaaagttatggagggtgagttcactctaatgcttctgaaattatctgttgatgtatccattactgacttattgtagacattatggccctactgtaagtcaactgcctgtctgactcctattccattcgctggaattgtctaaccctgggcagttcttcgatcatttctatgaagagaaccttaagattgccagcggcgcccaggacggcattcaactcgacttcaacaccttgggtatcatcaatggtatcattgatgaaggaattcaagccaagtattaccctgagtttgcggtgaacaacacctacggcatcaaggctgtaagtcatcaaagatgtaatgatatacttccacactgacaaagaatatagatcaacgacacagtttacaactacatgaaatttgccaatgaaatgccaaacggctgccaggaccaaatcagaacctgcaggtttacaaaccgcacctcggtatccgacctcgcactttgcgccgaggcagccaacatgtgtcgagacaacgtcggtatgtagactgtacctatataccccgactacatattacatctaccagaacaactaacaagctacggaacctcagagagcccttactacgccttcagcggccgaggcacgtacgacatccgccatccaagcgacgacccaaccccagaaggttactatacgaactacctcgccaaagattcggtaatgaacgccctgggtgtcgatctaaactacacgcaatccaacaacgaagtctacttcgccttccagcaaacaggtgacttcgtctggcccaccttcctcgatgacctagaagacatcctctcccgccccgtccgcgtcgcccttatctacggtgacgcagattacatctgcaactggttcggcggcgaggccatctcccttgcggcaaattacaagcacagcaaggaattccaggaggcgggctatgcgcccttcctcgtcgatggtgtcgagtatggcgcgaccagagagtatggcaatttctctttcacccgtatttatgaagctggtcatgaggtgccgtattatcagccagaggcttcgttgcagctgtttaaccgtacgctgaatggctgggaattgcccaaaggagaaaagaagctgaagcaggattctggctcaactgggcccgagtcggcgactcacacccagtcttcggtgccgttgcctacggctaccaaggcttctgggtccggtgcgctaatgtgagagaggccaatgggtggacctgattaaatattgataatatgttcaatggcattgtagtttgagatgttacatatgtacgcatttagatagactactccccataaccatagtagacctaaagtacacccgaaatgagagtccctggcacccacaaagcagagccacactagataatgtacaagatcaagaaaccgagttgactgacattgagtatttgttgaatatgatcctcacggcccgtggcgcagttgtggcccgggagtctcgcgggtatagaaaagtcacacgcctcgtaaatgcagatgtttcgtcaaactgtagtgagaatgaagaaggtgatttaaatcaaaaattgaccgcgtggtgatacagatgaccggtagggattgttgggtccctcgccgagcaattcattatttggtagtagtctcctcatgggagtcgcggagagtctcggtaggagtttggctttctgtgtgaggcttattcatctcagacatttcattggtatggcccaggacttcggcggcagtttcgtcggagaatcgcagatcgtcctcgacggcagtgctgtccttgaccttgaagaaaatcacaggtgaggcaacaagcatactaccgaccagtataccccagcaagaggcaaattcggccatgtatgaggtctcctgtgcatccagactgaacatttgttagttaggggaagagtagagagagagagagagagagagagagagagagagagagagagagagagagagagagagagagagagagagagagagagagagagagagagagagcaggggttgcttacctccacattccggcagcgccagcagactggattcccttgtagaaaccagcaaagttggctaacttgcggctgttgttggagagagaacccatgtaccaataagtgcaggtctggaaagctgcatcgtaaaatccgtagaacatgtacaggaacattggtccaatgtagccgctgtcggtgaaatccgtaccgagaccctcggtttcgcgggtgtaacgcttctggaaggcatatcctccaccccagatgcccatggtgatcgcgagcaaaacgccaaagttgagcttggcacgccacggacgcgagaggcccttcaaatccaacagcttgccgaagacgaacgcgcccaccatctgcatcagccagtacagaagactgttcagggcgcgagtgcgaacattgaagtaggcgagattgactgagttgaaatggtatgcgtagaaccagttactggccagaaacatggggaacatcatgataatgtatgaatcgtggatcagtgtctcccaaagacctaaaaactcggacttccaggttgggttcttgatcacaataacgcgcgagccatccttgcgcttgacgtgcttgcaatcgacaaggcaccagcagagaatgaagccaatagccatcagaacaaggaaggcgatgtaggtgccattattgacggtgccggcagtggagtgcatgttttgaccgagagggacctgttgatatcagtatattgtttttcttttccttttttttttttattattaaatgggatttcaaagtgtgcaaagtgaacgtaccaagctaccgatgacaccacccaagttgaaaatcacccagaagatagcaatgtattttcccttctcatgctcatgtggataactcaacatgaccgcaccctgagcacaccacagcagaccagcacagacaccgagcagagctccggcaaaaatgaggaaggccgcgttttggttgatattgtacgagaggagcgaggcaacgtagaggaagtacccgaacccacccagggagagtgtgagccgcagaccaatgcgattggcaatagagccggcaaagaaaccgactactgcgaaggtactgtatagtgcagtgtttgcattgttcacatcgtgggcgtcaacttgaccaccgccaccgagaccgctgacagcattgaacattccaggacataaaaagcagacaaatgacaccagatatagttgcatatccggcgaggcaaagtagggagcctcccatttgccaattttgaatagtggcttgtacatccatgctgggcctatcaccgattggtccacacctgactcggggtcctgagaagaaggcacaggggcagacatggacgcatgttgtgctgtcggcagctccgtgtgcttctctccttcttgcttctccgactcagtcatggttgtaggataacaagatctacaggggcaagggaaaaggaaaaatagtcaaaatcaatcaacaagcgagccaaggggtccaaagaatgtactccacgtgagaaacaggctgaagaatggtgaagaatggtgaagaatggtgaagaaatgaagaatgtagatactaatcccttcaaaagtatctgaaagaggaatatatttttttttattaggaggctaaggctttttagtagacaaactaatataaccgagtctgaaactttcttatcttggatccatttttctcaatgcgacatacacgtagccattgaggggaaggttgcgggggacaagaaaagatggagtcatcgagtctggagaagttgcaaaccaaggaaatcaaaaaaaggagttataataggaaaatgagggatatccttcaatgcgacaatgcggatggggagatgttgcattgggaagaaaaaaaagaagaaaaaagaaaaagttgggaaaggaaaaagacccgcatgcggagtgtagcatgcggggactaaggtactacggtattgatacggtattgtcaagcccggttatgataatttacaggccgagtatcgaggtgtattattacaatacagctactactactactactactactactactactactactactactagtatccaagtatatatggtataccacatcggcatgccgaatgtcacgcagtctacggttacatcattgtgcctggatctttatgtacttgggattttccccctcttctatcggttctacttcccaactacttgatctgatctgataaggaatatttcctataaacaatgccgggcaagacttctaccccgcgcattaccaagttcaccaactgtcgcctggtgcgcggcttggacttgatcgagcaagatctctggattgattctctcactggaaagatcctgaaggatcaagaagctttctatgggttgcacctgtcccctgacgagatcatcgacctcggcggccgtatcatcgccccgggtatgatcgatgtgcagttgaacggtgctcacggctttgacttctccgtaccctgtgagacaaaggaggaatatgatgaggggttgcgcatggtaaaccgtggattggcccgaaccggtgttacttcctacctgccgaccctcgtgagctccacccccgaggtgtactggaaggtaagcaaagagcaaaagtgtcgctataagccatgcgagattccccattcctaacctttactcttccaggtcctcccctccctcggcccaaccgcagggacccatacgccccaagacggcgccgagtcactaggcgcacatgccgaaggccctttcatcagccccggccgcaacggcattcacaagcccgaagttctgcgcgccgcggaaacattcgacgaccttctccactgctacggcgccgataacctgggcagcgacagtccaatcaagatgatcacagccgcccccgaagtaggcaacatgatggcccacattcctgaaatcgccaagcgcaacatcatctacgcaattggccactccgacgcgaccttcgaacaggctgttgcagccacgcataagggtgcccgcatgatcacccacctgtttaatgccatgagacccttctaccaccgcaacccaggtatcttcggtctgctgggacagagtgagcgccgcaggccattttacggtgttatcgccgacggcattcatctgcatcccacttccatcaagatcgcgtacaatgctcacccggatgggttgatcttggttaccgatgctatgcgcctgtgtggtctgcctgacggtgtctatgagtggacgaacggagagcggattgttaagaccggtgcgcggttgacgcttgagggctctgataagattgctgggtcatcagctacgcttatcgagtgtgttaacaacttccgtcgttggtcgggtgcctcgacggctgcggctatcaatgctgtcactgctgcgccggcacgtctgcttggcttggagggtgttaaggggtcgttggaaagcggtgctgatgcggatctcatcgtgctgggtgagaatgaggatcccttcactgggccggccttgacggttgatcaggtgtggaagctgggtgctaagatccacgatactgacaaggctgccgctttggcggtatgaggtgactctcaagcttggatgggatctgtttcttttgggggttagggtttctttattccagtcatatgttgaacagctctttcatctcgggttggttacaggcgttttggggtcgtggttttgcattgagcataaaatgcaagcgcatggttatcgcaccagctccatcttcagtttgaatatttgtttagattttcaatctcaaaatcttcaaaatcttcaaaatcttcaaaatcttcaaaaatttattctcggatatcaagtctatccatgataaattgtatatgtggtagataaataaaaggtccaagtctgtgtcgcacaccgggcagaatcagactcggccggcattcacaaggcgatcctccgcgcccaactctgagggagctatgcgccgttcgctcatatgctataataaaaccaaaataagaccgaaaatgaaataactttttacatgcatatcagatctttgacgcgtaagaagtccatgctttacagacggggctggttgcgagaccagccggcctcaccagcaatcagctcggcggcacgctcaccaatggtcaggaccgtcagcatagggttaatgctgggcatgtcagggaagacaccggcatcggcaatgcggatgcccttcaggccgcggaccttcagcgtggggtccacaaccgccatgggatcggtagcaacgttacccatcttggtagtaccggcggggtggtacacggtgtgggcaacacgacggccatactcggacagctcctcgtcagtctgcaccttagggccgggggcaacctcgcgcttgatccaatccttgaagggggactgcttggcaatctcacgagcggccttgagacccgccacgatggtggcggcgtcgtagccctcagggtcggtgaagtagcggaagtccagcgagggcttcacggaagggtcggcggaggtcaagaagagacgaccgcgggagcgggggcggggaatgttaggggtcatgcagaaggcgttcacgggctcgtcgtagccgagacgagtggtgttcagggtgaacggaatctggtagcagtgcatcatcacgtcggcaatcttgccgtcgaagccggcagcgttgggtagctcgcggcgcaagaagatgccggcgtcagagtccatggtggtcatgttatgatccacggggctgttgagctcccacatgatgatactctcagggtggtccagcaggttctcaccaacaccggggagatccttcacaacggggatgccgagtgcggacagctgctcacggggaccaagaccagagagcatcatcagacgaggggtgtcgacagctccggcacacagaacagtctccttcttggcacgaagagtgtgcttgacaccagactgcagagtaacatcaacgccggtcacggtatcaccctcaacgttaaccttgttaacccaagcgttggtgagaatggtcaagttgggacgcttctcgtcaccgcggagaatggggtggatgtaggcgacactggcactgctgcggcggccatcatccgggttgtaggaaatgttgaagaagccaacaccctcagtcagttcaccggtcttacggatatcatcattgaagttctcaatgacaggaatgttcatagcgctagagcaggcctggatccagtccttgcacagctggttgcggtggcgggcatggaccggctggatagtgttgcgcaggttatcaatgattcgggtgaaggtctcaaagtcccaacccttgcaacccttggaaacccattgacggcaatcatactcgaagggacggaaggagatgagagtgttgtggctggagcaaccaccgaggaccttcgcacgggagtggcggatattactgttacctatgaggatagtcagcacaagctcgtttactcacttagcatagcaaaacagtgtcatacccatgggttgctcggtggtaccgtagtcgtagtcaagctcgcctccgagcagactgagccattccttcaagttcagaacgcggtcatccatgaaatcactgggacctccctcaataacgagagtgcgcttgttagggaggtactcgaccaggcgtgcggcgatcacacagccggcagtaccgccgccaacgacaatgtagtcgtagctgttaacatcgacggcggggaactcgttcgtggtggccatgttgaataccgggggaataggagggataggctgaggggaagattggagaaggagggacctcttaaaagataattttcaaacagtctactcgggggtggtatgatcggagaaaggccttggatccaatctttttggggtgattgcccagctttcccttctttttttttttcttttctttttttctttcttttttctctttcccgttagactcggcgaatctttgacctctgagtggtggcgatcactaaaaagtggggagaagtgtcggagatggtttagataatatgatgtccaccgactcttaacggccgggtatcagctcttcttcatcggcataagtactaggtatgaattgttcaatgtgtccgttgatatccgtaaattggggaaaagaggaggtgtgtccatgataggaattcccttccgatgctagagcgtacgttactttcttcttacttttcaccgatttccgctaagaaatgcctttcttagtatgaaattcccgactttcaagccataagaagatgttcaagacgaatctggttaaagataacccgcaaaacaatcccaaggtttttcagccaccttcagccgctgaccggatggcgtacttagtacttgactgttacgtactgattatgctgggcggccgagtaccgagtacactacaccgtaatcggactagcagattggatacatgcccccccccacttttttggcttttatttcggagaaactataaggcggtgtaggttattctttcccgaggtctagttagttatcatttctcttatcttcgtatcctattatatgttgtatgaccttccttgttcatatacacaatcaatcatgtcgctctccttcccacctcgtcagctatattacaatggcaaggcccaagccgcaacctccggcaagtcattccagactatcaaccccgccactgcaactccgttggccgacatccaaattgcctccaacgcggacgtcgatgccgccattacttctgccgatcgcgcattccctgcttgggcgcagaccccgctgattgctcgtgctcggattcttcacaaggccgctgccctgctaagggagcggaacgatgaaattgcacgcgtcgagactttggactccggcaaggcctttactgagactagcaccgtcgacgtcacgactggcgccgatgttttggagtactatgccaacttcattggtggtggtggtctcaacggcgagactactcaactccgcgaggatgcctgggtatacactaagaagtcccctctgggtgtgtgtgccggcattggtgcttggaactaccccatccagatgtaagttcttcgatcctgcttttgctgcaccggagaagaaaagaagctgacttggatattttcagtgccctttggaaatccgctgcctgtttggccgccggtaacacaatggtctataaacccagtgaatacaccccgcttcatggtcagaccctcgcagaaatctacaccgaggccggcctccccgatggtgtcttcaacgtgatcaacggtgccggtgatgtcggtgcctacttgaccgggcacccactcatcgccaaggtctccttcaccggccaagtggcaaccggtatgaaggtcgcaggcgctgcctcaggaaacatgaaatatgtgacaatggagctgggcggcaagagccccttgattgtctgcccggacgctgagctagagagcgccgttgatggcgccatgatggccaacttctacagcacaggtcaggtctgcaccaacggcacccgggtctttgtcccgcgtaccatgaaggctgctttcgagaagagtctgctcgagaagatccaatatgtgcgggctggcccgctctttgacgagcagaccaacttcggtcccctcagctccaaagttcactacgacaaggttgtcgcatacattcgccacggtattgagtctgaccgcgccaccttgctctgtggtggtgtcgagaagcctacggtgcccaaggatctgcaagccggtttctgggtccagccgaccgtcttcaccgactgcactgactccatgagaatcgttaaagaggagatcttcggtcccgttatgtccatcctgtactatgacaccgtcgaggaggctgtgcgacgcgccaacactactgagctcggtcttgctgctggcgtcttcactaaggatttgaacctggctcaccgcgtcattgaccagctgcaggctggtattacctgggtgaacacgtggggcgagagccctgctgagatggctgtcggtggctggaagaagagcggtctgggcgtggagaatggtcgtcgcggtattgaggcttggctgcagaacaagagcactctggttgatatgagcggtgccgtcgtcagtgtcttcgccaagctataatgttaatatgtcatgcaatgtacgacacaaaaagcaaggagcataaaatgtacggaatatagaacaattcgagcgccacaattaagtaattagtctaggctctttctgtatcttcattctgttactgaggcatttgtatatgtttctgatatttctgtgctggaagtccacaagcgcaccgataaggcatatatactgacctcaaacgactttacgctacatacatatgtacacacgtataaatatggagatttagattaattgtacacagcttgaattatccatagctaaaatctttgatgtcacttaacccctagaaaacgcatctatcaagccaggaataattgaaatgaccagagaaactccttagataacacccatggatcctgtaagccaaagcagtaaaagacagaacccatctttccgttctccccttacaaagaaaagaaaagggaaaaagggaaactaaaccgaaaagaaacccgctgaatggaaatgccacaaattcgagaggtgttcaccatcagagtgtggtcattctggtgcccatgcgatcaaagataaggtcgctcttcagcgcaccgtcgataccgccaatggctgagtcgaccagacgcgaggacatgctatctggagtgagctcctcttcttccagtgcgcggcgttgcagctcagtgttgatacggagatcttttggcaccttctcgggggtgccatcgggagtaggctgctgggacttgggcgttctagctggtagtggggccgggacgtaagtccgaggacgataaacgagagccggtccctgagtgcgggcatcggtgccggcctgctcgatcgattcgaagtaccgtacggtcttgaccttgagctcgagagtggcgtcgcgatcgcagacgatgagcgggtgttggtgcagctgcagtgcggagagggtccacatgtggttcacgccatcctcgaggcccttctgcacggcaaacgctttgtgcgctccggtggctacaatcaccacttcacgggaatccataatagtctgaataccaacagtcatagccatgcggggcaccttgtccgtgtcgccaccaaagaaacgggagtttgccagaatggtgtcgtaggccagtgtcttgacgcgcgtgcggctgttcagtgaggagcctggctcgttgaaggcaatatggccatctggtccaactccacccaggaagagctcgatgcccccgtagcgggcgatccgtgcttcgaacgatgcacactcggctacaggatcagtcgcagtgccgtccaggatgttaatgttctgcggtaggatgtccacgtgtgaaaagaagtgcttgtacatgaagctgtggtaggactcggggtgatcgcgaggcagaccgacatattcatcctgtattgggagttagtgggctgttttactccgtgactgttgtcgcgcataccatattgaaagtcacgacattcttgaaggatatctcgccggcgcgatgacgctgcacgaggatcttgtaaatgagttcagggctgctaccagtaggcaaaccaagcacgaacggctgctcgggggtcggattgaacgacttgatgcggcctaaagagggaagagttagtctccgtatttgcgcatcagcgcatcgaggatctgtgcttcagcttactgataatgtagtctgcaatatacacagacacctcacgaggatcttctctgataatgacacgcctatattgagaagccaatagattagtatgccagaatgcgatatatagaagatatagaggactgtcactcacataattacgtcacgagtctttggaagttggagacagggctaagaagtatgggaaaataaggaagggaagaagtaagctgatatctaaaagaaaagagaacattcgataaggtacaagggaccatatgggttacagttttggtggagtgtacgacagtgacaaaaagagaacgtcgtatagatacatagacacgtgctagatggttgcctccccctctacgactgggggccttcagggggtctatccggattgacgtctacgggttaccgcatcctggacaaagaagaatccactgagatagccattgacttcatttgggcaattccacggtttctatcaaggtctcaaggtccactcgggtgtattccatggggcccaacaaccaagccaagagtgcgatgacgggaaaaaaaaaggaaacaggcattctgattggagtatagagctccatcatgcacatggtggtctgaaggttccatttgagaagtgtaggagttgcatccggtgatgtcggcaaaaagctggagaacatatggtccagtgcaaccctggacgttgtagcttgtaacgtcgtagccgggtatggtattggtattgatggggcacgtgacttggaattggatccggattacagttacatacagatcacgtgacagtccattttgggtgtccatgggtatatatatattatgatctcttctcaataatctccgacgtatcttatggaaacagtatacattgtgtgcggagagtatgtacttatacttattttcttgaatatagtcatacataaccaagtaactacatataacaatgtacataaaatctagaatatgccaagatcccgtgaccctgacagcggagtttctcccctatctccttatctctctagtcccaattcttccccgacatttgcggctctggggcagaaagacaaagctcccgaggtccgattttttgactcctgcaaccctttaacccccctgtcacctgactacgcgtgcactggcttcatattccttacttgtcagacgtttgcggtgtcctcaccttggatctcccgacattgcaccctccgcatcctacctctctgggccgctgcaggcattcctcctcgggcgatggcccggaaagaggacatgctgcccccgggctgggaggacctagataggtaagtcaattctcttgtttcgcttgactcatcccctatcggcgttaatcctcgccccccaaaatctgcctgtcggggtatctcccttcactgtggaacctaactgtcaattctggggttgagggttatttagactatttccagtttaggaaatatggcacctcgggtacgctgacatgacataggcagatgggccagctctttatgatgggctttgatggaacttcggtcaacccacagattcgatcacttattgagaattaccacttgggcgcggtgctgctatctgcgaaaaatctgaaatgtagcttttaaaatggcccttcatcaatagcatcttggacagtcactgacgcattcatagcggccgaggatacaaccagattggtcttggaattacagaccattgcgcgtgatgcaggccatcccgtcccgttactaattgccatggaccaggagaatggtggtgtcaacagtttatacgatgaaatatatattcgccaatttcctagtaccatgggcatcgcagccactgggtccaaatctttagcccacgatgtggctgtcgcgacagcacaggaactcaaggcagttggggtcaattggatcttagggcccgttttggatgttttgaccaatgtgcgaaaccaaccattaggcgttcgtaccgctggcgatgatccccaagaggcgtctcgatatggcgtccagttcatgaaggggtaccaagaagcaggtttagtgacttgtggaaaacacttcccatcttatggtaacttggaatttctcggttcccagacggatgtcccaattattacggaatccctggaacaactcagtctcagcgcacttgtaccctttcgcaacgctataagtcaaggcctagatgccatgatggtgggaggtgtctcattatcatcagctggcatgaacgtgatgcacgcctgtctgagtgatcaggtggttgacgagctgttgagaaaggatctccaatttcaaggggtggtcgtttccgaatgcttggaaatggaggcgctcacacataacattggagtaggaggtggcacggtaatggcgaagaacgccggctgcgatgtcatccttttatgtcgttcattcccggtccaacaagaagccatcaacggcttgaaactcggagtggagaacggtatcatcggccgtcagcgaattgaacaatcgttgcgccgcgttttggatttgaaggcacggtgtacttcgtgggaacaggcactgaaccctccggggctttcttcacttacacagatgcaaccctcgcataccaacctttccacccgagcctacaattcttccatcacagtgatgagagataagaataatttacttccgttgtctaatgtcatcgaggcagacgaagaacttttgcttctgactccgctagtcaagccactcccaacatcagcagtttctctttcggtcacagagtctgcgcatgcattatcttcagaacgaacctcgtcggttttgagtggagagggtgtcttcaaagaacttggacgatcactgtcgcggcagaggaacgggcgcgtgctgcacacctcctatacttccaatggtgtgcgtcccatccacgaagacctcattcaaagagcgagtgctgtagtcgttgtcacggcagatgcgaatcgcaatctatatcagcaagggttctcgaaacatgtctccatgatctgtcaatcacagtataactcatctggtgaacgccgcgagaggccattaattgtggtggcagttagctcgccgtatgattttgccatggattcctcaattggtacttatatatgcacgtatgacttcaccgaaacagctctccaagcattggtcaaggtcttgtatggcgacttgacaccctcagcggcccttcccggctccattggtcgaacgcagaagatccaccagtctcgacagcactggcttgtcgaaaattggaacgaggatcgcgacgctttcgccttggatgctttgctcgataccgtccgtgccgactatgcactgggccagccgtcggaacttcttggagctaccagtagcagcttcttgctacgaaaggaggatgtcgacgaagcccattttgttgtccggaacagtagcacacatgccctctatgggttctgcgcgacctacttctttcgatcaacaggcaccggcgtgcttgcctgtctgattgtggacccttctcgaaggaaactatcaatcggacattcactccacagccgcgcgattcggactctacttcagcggagcgggatgagacgcttccagttaggatcccgattaccaggaatctaccttggcatcccgactgtcaaccctgtggagcgtaagcggctgcggcaatggttcgcgaatatggggtggaacaccgccctttcccgaccagtgtgcagcgtgatcctgcgcaacctgtcgacatgggtgccgcccgaaggtctcactgcgacgctgcagagtgccgaggtctcatacgacctcgtgtatggctgggattttgcgccggcgatcctcgaccacattaaaacatatgcgcggcaaggcgtggccgacatataccgcatggctctgggcgatgcgcctaattgcgggatcattcgggccaagcggccctctgacggggtcatactcgggagtgtcgtgatttacaatgtgcgatctgccttggcagagcacatgcccgtgctgcgcgccacgcaggcttctgtcggaggcatttcatctccggtcatttccccttgcggtgaagattactccgcggttatgcagggccttatcctgctagctatcaagcagatccggaagttaagcgccgatgctgtggttatggattgtgtatgtttgcttgtttcttttctacgatcattctctaaccaaacataggtcgacggcgacggtaacttcgaccatctctccacgatgggcttcactatgctgcacagcttcgaggaagtgaactgtgacgcagctacatggacgatgatgcatgcgtagtaggtatcagacttgattcgactctcagttttttccatttcctttctactattttcggttctggtttattcgcgtctatgatatccatatcgcattgggtttggcatttattttatcttttctctatatatttttctgcttcttttttatatatactcaattggatctggtccatttacttctgttccacacgatccagtatcggtttcttccgagtttcttttcccacatagctaggtatcaagatattttctattatctgtgtctttagagtctttggggtaggacagaaagtcgttcggtccaatcaagtcaataaatcaatacttttattggtcaccgggctcattacgattactgtaaattgaagctattcccataactgtcgacttgattctgaagccttccgactgtgcaaatgcctcctactgatgttgagcttcataaaagcgaatggacgaacatggggatttgtatagtgggaattggctcgtttcatcaaatgtggtggtttccaaatagtgaagcctggctggcgcaatggtaagcaccttttatctgactatcgtctgtttctaaagcaaagttgattaaattgaataactaaatacatagtggtaatagcaacactagatttgctctagttgcaacattgagccaataaatagatctatacctagcgcagggtgtcaaaatacaggttaaatgaatcggtctacacactacggaggaaccgcaagttccaagattaattaagcctggaggaattccaaggttgatattaattttctccgtaattaccctttaaccctttaactttcagaaggcatcacaattaaagccgagatcttactggaccggaggtccgttggaccacgaaggctaaactcgatttattacggacaatgcacatcttagcttcagggttttatgggggaattgggggaattgtgggaactgtgggaattccctgtagaacggagctccgctttggcgccggaggcggacaaaagccaacccgctttttttttttggtcgaaaagagaaaaaaaaaagaaaagggcctgtgttatggagtatttcgtctgatttcagtaaatgtgacagaaggaattagtatataaagaagactattctctcttttctccgtgttttctatatagaatcaaagaaatcgaaaccccccaaacgggcttctcgggcctcggggcctaactttgacccgggccaataagtttattggttcagagtttcgaaccaatttagttttctgtttgcgttaaaaatccctcagttgtacaagcggaaccttttttattttttatttttcgcagctaaactgggagtctcgaggtctacactcttgatctacgatcccaggaatgttgcagatatatcctgagtggatgtactacctagaatatatattatatactaatatactactctatatacatgaagcttttcgggatctcccaaactgaaaggttagatccggcaccgttgaaagcgaggtctcaagggctggagcttccaaaggttcaatgttccccttggaaccttgaaaccttggaactggcgccatgtccaaccgtgggtggctcccgtggtcagaaccttggtatacttggtaggctgcatcaggaaacgcgccggaagaagaatttaaaaaggaaaaaaaaaaaaaggaaaaaagcgaaagagataatcaaatcgggtaaatgcacagactcttctgattcacatgcgaaagagaggaagcttctcttttactctctcgccactcagtctcccattctcttactgtctgacaagcccctggaccaggctgtatctccttccacaacggattttgtttgtgttttatgaaatatagagagggtttccaaggttacgaagaaataaagtgtaaagtgcacatgtaccgtgtataaagaactaactacaaacatacttatactccgtactccgtacaaatttatatgaagtatgaacttggatctgtagcagacccacggacgtcgccgggtccgagaacaaccagctcgacttcaaggctaccgaggtacttatccaaatgctcaaaatattacatgcatgataacattacagattgcagattgcagattgcagattgttagtattgccgtttccagtggggcgttaatagcgaaagtacagggtccagcgaagtacgggggcaccgctttctgccccattaccatattctgattggatgtgggttggcccctccagctgcatgtcagacggccgacgatgatcatcctcgagacgaatgtgattgcattgtcgagatgtgagaacggaattatgtacaatatagatgcattagttggaatattggaacagctatagatatagatatagatatacattcatccagacctacagagacacaaggtgcaatgataactcctcaatactctaacatttattaataataatattatatttgtggcgttttcaggagggtcgacccgaagcagtagtaccttaataggcaggtgggtatgtatcgttaaagtgaatttaatctgagatttgtacaatttgtattaggtacagactacttgtagtatcagagcatataccccgtatagaatgctatattgggaattatccatataacaatatcaaacttgatcttcagggcccagcgagagatgattgccgagagccggcgatcaagtcttaccccatcggtgctgagggatttgcatgttaaattgttattggatatgaattgtctgagatactccgtactactcaggacccaaaaaaaaagattaaaaagagattaatcaaaatgtaatttaacattaaacgttaaaacattttcaaaaatataaaacagaaaaaaagacaaaacgacaaagagaataaaagaataaaacataaaacttgttttctataaaaaagaaaatgatgactcagcgctgcgttcgttctccgcaaaaaccgcggctccactattccccgaatccgttgatcgtttgggtgcagaaggtcgagattcctctctctctctctctctctttcctcctcgatgatttgctcttcttttattgtttagatacactctaattctctttacatttaggcatttccatttccgtctcaaatgtcctctccgccttcgctcccgccttagtctatctttcccgttgcagcattccccaggtcttgtctactcattggcttctcttcaacctctttctctccactgtccctatatatattaggcaattctataactcttcctcccatcatccacgggtgtgcctcccgtatcgcataacctcttaccatggagggcttcgatactatggcgatgccaccatacttggccagtccattgtcacttgggaatttgcagagcaccgactatctcaatgcgatgtccggcctggatatgccggatcaccgttccaacttcgattccgagacctttgttaggtgattagatctccaagcgggacgagagggggtggattatccactccgctcgactgtgaaatgggttttgctaattccaagttagtgaggatctcgccaactttgcgcctcctaatctatcacatcaactgaggcgtttctcttctgcatacgatgaccctttcagcgagatggtggcgccctttgacccagcgccccaggaacaaccccaggactcgtcgatcgaccacaacaacaagctgttaagcttttcgataccggtataccacttcacgctcctcgactattccatgcgccgaacctccttatcggtgtcggcgcagttgcacgggatgttctttctcgctgagtccccctatacaacatccccttcagaaaatgccccgccacaacaaggtgccgagttgacgtgttatcgtcgaaatctgttccaaatcaccggttcggtaacattgccccgcggaatgcgctatatcatgaccgaccaaggcgaccgaatccccatcctcgcccaggaactcaccgtatcagccacagaatccgtggaaggaaacccagtgaagatcatctcggtgccgtggaagaccccctcggcggcggcggccaattctggcccggctccggaggagaacaaccctagcaccggtgctaagattgagaaggaacctcccccaattcccttggacatcatggcaggccaggatctggactcggactatgcaactttccctatcgcttggaaacgcttacaattccgtgtcgcgacggccaacaatggtcgccgaaaggagctacagcaacattttgtcgtccgactcaaggtggtcgcgactttatccactggtgcaaagatccccatctcagaggtgcagtcaggtcccgtcatcgttcgtggccgcagcccacgcaactttcagtcgcgcaaagatctccctctcagcgggagtgctgctgcttcgcgaaagaatgcccaggccaactcctcgaattctgccataaaccgcacgccaacaagcgactccgtcccgcgtcgtgctagcgtgactccagccaagacaaaaccagcggcccagagcagctctcctgaaaccacgtccgttcccccgccgagcatcatgcagcagaccaaagcgacaccggattggacccccatcccgcagtccgcatcaaacaatgtcatgtctcatgtcccaaagtccatgtttcgtcattccagcccggagcaactctcccaggcgacggactcacatcgccgggtcaattctacaacagcggccactgcaccgatcaatttgtcgttgctagacgaggaagaaggtggtgaccctaacctccacctggaaccaaagatggtgtccccttttgctgccgagttaccacatcagcaatcgctgggtctcgaccaatctgccccgccttctaagatgcgcaagctctctcatgctgtctctcagaccccctcacggagtgttgcttcatccatgccattgctagagcctgccaacttgccccagtcattcgcatcctcgctccccttccctaacgaaagcactgatcttctttacgagtactttcctctcggcatggatgactggcaagcccccgtcgacgctgtctatcgaccacatgtggtgcatcacactaatatgccggagatgaaatttgtggcctctagaggccggagcaaacggtactttgcagcagaagatgtgttctaaactccctagtactgggatatcgggctaacggtgccgggtgttgtttgtctttcccttctcgcatctgcattatcactctaggatggggtgtttcttgattttttacctgctctttttagacttgactttgtggtttcatggggaaacacagagccccaaaacatgattgattccgagctgacataccgaatgtgttactgatattgctgcgtcatttgtttgggttgggggttcggggggcggatgattttcttatctgtgaattcgaatcgcgcaaggcgcaaatagcgaatgcggcgtgctgaggtgttttttgatttcattcttttttttttgttttggggggttgatttagggcttggatttacttggatttatttggattacccacgttggaccggattgggattggcactggggtctttttatctctctttctttatgcccttttggttgtggtttagttatatcccattgtgtcatgatatcacgctattcacttgatcgtgatggggcttcgctgcagagcccgagagaaccttcatacatgttctcatgccatcaatatattataatcccgtctcgggttgaccacttgtctttcatcttccggagacgtataataggatttaattgaaagagtaagctcactcaatgagtccgcttttgtaatttcatcaaactaatgcaaaaggcatctgtttccggtatcatagatatccgagtccatcaccgccaatagtctccagatccgccttgatctcccattccgtcgcaccgacccggcccgcaatctcagtctgtcgctgcttgcccatattcagccatagacgcaatagattaccatcaaccataccccggcccgcagcgccatcactttcaatggctcggaaagcacgcgggttcagaccggcagggtggtcgacggtgttgattagctgagactgtagtgcggatagccgacggtatgactcctcggcaaccgacgtcacaagcgccaaagacccgttttgcgaagcgatgagtacctggtgtctcgcgaaggtctcatccaggtccattccttcttcggatgattcggtgcgctccgatgaaactgccgttcgaggcagaagagttaccgatgatgcgaagttgccagtgtagaatttacttcgactgagcagtcgatcgccgttggaggacttggggtcttcggggtcgtattgcaggacatgcaggttgcagtcgctgtcagcgactagcatatacagcttattcccgtcagggaggaagtccgctgccaccacctccaggtattcggggtctttgccgaagagtgtcattctatatggctcctccgagtagccggcgaaccagagtcctttcacggcatctcccaggataaccaaaccagtgcccttgagctctttcgcgacagtgacgtagcattgcatgtccatgaatgcaacgggaagcaggctcccgtcttccttgagacctcggaccatgcacttttgtccctgggccacgattacgaacccttgaccaccgatgccagacagtgccgtcactgcacctttcactgactccttgccgattagcttgagtttgtggcctgtctctggcttttcggggtctggagcgactttaatcacatcaaagacatagatcgtcccgcgagctggcatatcttcccctttgacaatggcggtcccgacgacgataagatctctccgctcgtgcgtattctccgaaacctcaatgttcacatttttcactgctgtcacctgttcatcgggatccagaggataactataaatattagtattcgggctcatcatgcctcgagctttgttggagttctacctgtcaatgatggtccatgtcttgggactgacgaccttgatgctgctttcgggtattttcgggcagaatgatagctcttggtataaattagcacagcatgatgggaaaggcttcaagcaatcacaaaccttcattccgccactcagggtgcaggtcatcaccctccggcaacttgaagtctccttcgcggcttgtgccgagaacatatgtctcagaagacgtagagtaggccaagaaatcgacttgctcttcaattggaactttgcgcaacgtccacggatagtcaaattgagtttgggaaggtagttgacaagcccggacacagttctacaaaaggagaattagtaaatgtagatcgcatcacaactgtggataaagagtctcacctgagaatcaacataaatgaagccattgtcacgcccagtatccaccgagtcaaatgaacttagccaacgtgtaaagcctcctctaagacgaatgatgtgcggggagctctttgctgtcctaaacacaaagcttgatgaagctcccggcataaatatggtgctaaaccctgagatattaggaaggatcctcaacggcctcaaccgctgttgcttctgtatttgagatgatgcctcccctgaagggctttttggtagaacatgatttgagtctcggaataattgcaaacgagacgacccatggccatcatttgctgggattaggcttggtttgtagaacacaaggtcgtcattttcggttcgaacctagaatggttgagttagataccaaaaaagccacggactgacaaagatttcttacaatcagataaggtgaaagaccagaactatcaccaaggtcggcaacaacaaattctgtcatggtttcgcgagtattggatcgtttgggcggctcggtcgacaatacgggtggtaagcagtcgacgccttcaatgatcgcgatcaacttcatgccagaaagtcggaagatctgtgatgtgaatcagaaccagtgctttgaatgttcttttcgcgacgacctaccgataacgtatactccagattcaacaggaatagaagcacctcatcttctgaagagtccttcgacgatgagtttgcaatgctgaatgactgtgaattatcgtgataaaggcatccggagcgccatcgtgacgagctaatctcactcgaaagcgacacttcatcgagatcaccactttcatctgcctgtaggagcaatactgatgaatcatcccgaataatcacaagataaggatctataaagcttgcgctcgcagccacgcgttcatcactggtgtcttcatcccaaacgggatagatttgtgacagtccgaggtctgtagaggttcaacattagcgcatgtaatgctttctagcacgctggagtagaatgcacctatgtcatagcttctgacttcatttcgcaaaacctgaactagacgagtattgcctgccaaagatccaatatcaaccgtgcaatcttcgtttgggttgaactccggtgccttaaaaggtttcaagctttgttcttccacgatgaagacctcgtttacctcctgctccgaatccgtagaccgagagataaccacatattgacaagacgggttgtctgtgctggaagcccctctcctttttgtaacgctagctgaccaaacagcatccgcatcatcgactttcagagacatggtcgtcaaaggatcaatttcgcgcttgatgactaccaagccaccgcctctgtctgatccttgagatgccaccaactccaattctgcagcaacagttcctgttgtagcttggctttttcgattggtattcgagaaagctttgcccaaagtgatgtccctcagcgggccaatgctagaaagtttgtcatttagccgaaagttataaaattcgggggttgaactgtcggttcccatgcgattgtcgacttgtatcggcccaggcgccgaggaataaaggtcgtcatcctccatctggtcatcctcatccgaaagatcatcaagaccatcagctgtctgttttgactcaagccgggctttcctagtagaggcggatgtatgcgaccattctaggagcaccgagtcggcgtcttcgctgccgatgaaaacgtttccatccccgagacaagtggaacatgacgcggccgacttcaagatatctccacctgcatacgctggaagagagtgaacagtaatgccggagacagaccgaccatcaagtttgaatttgatcaatgccatgttgccggatgcaagtgctaggagtagatcgccgctatcaccacccagtcgctcaaccacgcaaccttcgaggcggaacgccaagtccgattggtcggtcattgaaaatgaagaaacctgccttgaaaattcgttgactcccaccgcattggttttaccggcctggtccacatgaacaatttcatttgagccaagaagcaaggcacctcctactggaagtgggagtgccacgaccttgaacagatcactaggaagacgagataccgaaagaagggtggtagaagctcgctgctcaaggtccagcgtaaacacagcgtagaatacaacgtcctttctttcatgaagaagggcagtagaggttgcgacttgggaatataaaattccaaatgtcggctccctgtattcgtataggaacgcaagacttatggggtgtagcaatgaaggatccaaggcagtcaatggcaggacaaaagacgaggagtagggcgtttggtggtctggttcttcttttctcttctcaatctgtgctcctccgccagagttctgacttgggcgttctccgtcaagttccgaatcgtagtcatccatcaccaaatcatcacccgcctgatgaaagggcaaaatcgcaaggttgcgaattccgaagttgtacaccgcgcatctactgcttgggtcaacgctcaaaatgctcccacaccggctcagatcaggcacccaggggctgcgagtcagatcatcccgctcgtagtaatggatggaaattgttgatatcccgcgacgctcagggtcccactcaatcaagctgagcttggcattgcggactgctatcaatatggcttctccgccactcctggtgttcaagattttcacgcggcttaaatcagtcacggttccggacagtgggtattctttttccagcactaatttcgtttctggctgagaggattgcgaagaaagaggctctggaacttccttctgtggttgagaggagacgatcttaacgagagagaagacctgcaatagagaggttctgacaacaaccaaattgctggcggttgctgagatgaaaggaactgccaaagcatgggtgacccccgttgggggtaatagctctgtgtaacactgcatttgaagatttcgtccgccgtcaaagctcgtaaaaggcttgataccgctagaaaaccaccaatgagctaaattgtgtttttgatatggcctgagatgcacattgcaattgcaaacctcggagcggaaaactgagaatgcgaagccttgtaagcaaaaagagagatgacgcaaataaaagctttaatacaaaaacgagaggtgatcaagatcaagatcaagattgatctctaccttgtgtagttcaagtttgtagctcctttgaagcggaaacaaagcggagatgggagcgggtcagctgactggtctggcagaatcaaacggtcaacatattctgcctgataaatcctaccgccattttgctgtaaagatcaaattggtttagcgtcgaataaccaatgacgacacaggcgatcgccagcttcgggagggaagctggaatcttgatttgatattattgtaagtctcattcctggcaccccttcaggattttgctagggttgtcgatgcaaacctcataacaaatgtgcaaagtgtgaactgctatccttcaatatggcactccttcagacttccctcatctgggctgtgtatggggtggtggtagctattctactggcagtggcgtcagtgtttatctatgtctaccaaaccccccgcgaccgatctccttcagtcaccctggcttgcatcatatctattactagtcttctcgcaacagtgctcttgcttcctgtcgatgtcgctttagtgtcatcgactacgtcgtccaaattaggccagcgaaaggactgggcaacgcaggatgtggtggacagaatcacttattccttgaccatcatctactattttctctactccttggatgccttactctgtcttctggtcattccattcacatatttctggtatgaggaatatgacgaggtcgcgagcgaggaggggaaccaaactctgggccaacggatttggggtgctcttaaatacacgctctcgttcgttgcggtcgtcctgatcttgttcctagttggtttcttcgtcccagtgtcacggggaaagaatgacatggatctggattacttcaagcgcttactgactgaaaaccgtaagtattcgagtattctggcattgggcagaactgtgaaactgatatgactctgaaaagatggcgagcgtgctctcacatttgctcttggcctgttgatgacaattgggctctgtctttatgtcgtatacacatccgtgggactggcccttctgccaatcagcttgatgaagactgcaccatcaatttctagtgctaccttgcgagcgagcactacccaacaacttgacataaaccaagagcggcaacggcagcttgagggacgatgtgccggagaccccgagcttctgtcctccaaggaccgccgagaactagatacactggtgcgggaagagaggaccctgatccggcgccaacgtctagccgaagaatcccaaggcggaggccgcagctggttgataagggcatggtacaaactcggggcagtgttgcgtcccttcaagctcctgggaggtatcttgctgctattcattgcctttctcacgtgggtatcgatgctcttaacggcaatcgacaaagcaaaaaactcgatctgcaagcatcgttgtggatacatcctcgcacatgtcaacatctttaaccccatcaactgggcgcttgttaaatccgccaggtttttcccctttgactacggtatctttaccgcccttgtattactgtttttctccagttctgtggtcggaattgccgtggtcggaatccgcttcctatggattaggattttccaaatcagacatggccacacatctccccaggctctactcctagccaccgccatgttgatgctgatcattttagcacttaatcattccatttcgatggtagtcgccccccagtatgccacattcggcccacagacattctgtgatcgtgccccgggagctttcaccagaaatccagattgttcaaacagcaaagaacttatcaagccatgctcagagttggcaaagaatcctgctgcgcagcaagtttgcacgcccagtgtcgtgagcacattcttgaaccgagtcaccctgaactacccattctttggagtggtgttcttttgggctcagttcttcttcctaggcaagtcttttctcgttccgttcccaccggaattccatcttcgcattgatctaacaccaacaccgcaggcttatatctaattgtctttgttacttcccttctccgttcaccccagttggacgaagcccaactcgatgaagatgcggaggaagccgaggaggaagggttattggccaataccggcagacgcttcaacgccagctggcaagacataacagggagagctgcccggagtgaacgatctcgaggataatcaccaaggccttagaaatgatggtgactaccagagaaatcaacttgtagtcctttgcctgcaatgatgaatggtgatactttcagctgtctcctatgaatgtcatgaaggatttcaacggcctttctctttacttgtagtaagtacatttagttaattagttaatttttttcttctcttttttggccatcatataagtgaggaagtacataatggatggcttttgcatattgattcaattcctgtcttggaagattggtcttcagaagggatagggtaacataacctcataattcataaacatcgtgtcgctcatgtgcttaaatcttcatttgatcgtttaacaaggcgagagcattttggaaagcctttactacttccacatctttagatagatgagcgatcagtctttgtgatcctaagaggacaaagggggactcacaatgcttctttttgttttccacattgacttcggaattttggacgtgctgcatttgggtcttgaacctgtggataattaattatgtgtccgttatcttaagccaaagctggattgattgaaccttttcaaagccctgttctcgtcttgcgaaacggtagtttgagaccatgccatgaaaacctaccagttgctcagacacgaaattgtaagtagggcgtgtttttagaacttacctcaagaagcttggccgtttcaacacgaagattctcttctactcggccatgttcctccattgcatcggcatatttcccctggagttgttcccagttgcagtcctcgagtccttgtgtcaacccagagacaagtgggatctcatcatagataggggcaggtgtaggagcttggatcggtgattgcggtgagcgagggcttttgttctcttggaagctcccactgcccgagcttttgcttccttgactgcctcggggtgacattgtccccggtcgaggaatcttgctgggcttgtttggtgttgactgcatactgaattggttggcttggtatgaagatatgtcagagcaaagccatatcagaacgaacgattgtttcagtggaatttggagtcgctttttgttttgattcgtggatgtttcaaaggttcctatcgaaaacgggagataagattgcgataacggatcaggtgacgtcgacaagtgcatgtgcacatcatcccgtcttttctcctcttcctttctctaaggattggctaaagatgacttgaggccgctcatatcctttatctcagcatattatttgagtcatgtgggatttgaatctccttgatgaccccttctcaccccgctatatggttctcggcgactcaagtagcacccataattatcctggaacgcaacatggaaatgccccttacgctctcagaaaaccgctcaaaataaaatcgaattgtctgcgatgagctgctctatatgctcacgtgcccctcattcccgcctttctttccactgtccgacatgtgcccgcaatcagctatatcaactacgaatcgacagtacccaagttcttctggagaaagaagtccttggaaagcaaatcgaaagcgccgttacatgtggtagcccttgggataagccttccccacatgcacaagacctgctcgatacagacaaagcttgctctccacgctgggtcctccaaacgataagcactcgacatgcagtgtctttggcaaagagagaattggtttcgcatcagcttgaggctttgaaaatagaggtagaagccaaaaaagccaagattgcaaagcaaaaagaagtcctagcaagaagacggtcagatgctgaatctgccaatttccaactagaagagcgggaaactggaatcttggcgggcgttcaaaataccagcaaacgggtggaacatgtttggcattcccttcatagcaagacggcggagtcacgtatttatctttgtcgagaagtcgccaatatatatggcctccggaaggctacgaagaagggccaaggtcgggagacatacgtacttgggtgtggttttattgtcgacctgagggatatgaatggcaagtccacaccgtcccgaggtggctttcaagcagtcattcatcccgtggcatactaacagggcgggtacaggtattccacatgaacagatatccacgtctttttctaacatcgctcatcttctgatcattgtctcacactatctctccttgaggcttcccgccgaaattacactccctcacaaaaaccatcccgcgcctacgatctacaccccctcagcatcataccggtcacgcgacggtcacgatggagctgattaccagtcttcgagtccagctgcatcaaggacggtggacccgcgcatccacacaccacgcccgcggcctctctttatcgacaagcctctaccccggttagcgaaggaggatcccgcaacatatgccttctttcttgaaggagccaccctgctggcatggaacgttgcatggttatgtcgaacgcaagggataaacctctcatcggactcttgggaggaagtctgtgatattgggaagagtttgtggcaacttctagttgctccgccagcacacccttccactctgctgcgagcttttgccgggagagacacgcagacacaaatgaaatctgccaaggactctcccaaaaccacgattcagcgaacaacttcctttcccatgttgggtcactattctcatggcacggcacattctttcctgggagcatcggaaggagttgaattcatgcgaatatggaaactcccaaccccaaccaagattgtggataaattgaagtccaaccttctaggggaaatggccagtgctgaatgggaattgctagaagaaaaagaatgggatgatacggtcgtggattctcctcctcagtcatctgtccggcaaagtggcaaggtcattgtcccgtctcaatccggatcggtggaaataaacagaacttcaaaaacacgttctgggaggactcaaggcaatgaggaagcctcttcccgacctaagggtaccaaaggatggactaaggtagcaggtagaggacatgaatgagtcttaagtatttattccatgtcatgtactccgtacatcacacacatccatgtcattttcctttcttcatcaaatcccaggacctgtatcgcccacgtgggagatgactaagctaggagctcagggaatccagactcacgttatccaagaaagccaccctaagcctcttttgtttctttttaaagatataatatctctctatgtttcatcttcctggtctaccatcttggcgcaatacctcgtcttaaacccaattgcttgacctagatccctacgttagcggaacattcccctccaaccggggatgtggttacagctcaacggatttgagataacaagatgcagaatgcccaagactggcacactgcaaatgtcttaccgtcaggttagctatctttgcaaatttgatcgtgattggttactaactattctccgagcagacttgaagcgtgccctctccgcaatttcagaaatccccgatgctctcttgcgagcagaactccttcggcgagatggagcttcagatgatacaccggcatgcggatccaagcagcggggggcctataacaccccgttgcatgtcatggcactgttcctcatccttgggctgagtacattcggtatgcactggcttctcctgcatctctcaagttggccattactaatgctgaaactataatagcttgctcttttccggttttggcgcgccgtttccctcgtctccccattcctcgtcggttcctctttatatcaagacattttggaacgggcgtattgattgccacggcattcgtccatctgctccccactgcattcgtctctctgaccgatccatgtctcccccggttttggagccaaacttatcgcgctatggcaggattcgttgcgatgatatcggtctttgcagtcgttatcgtggaaatgttcttcgcaatgaaaggtgcaaagcatgtgcacggaagcgagtatgataatctcattggcgaggttgggtgtgactcaatacctgatgggggaaatccagtcgattactcggggctagaggccccgcaggtttcagataatatctatttagatagcatgggacatagctccaagtcgcgggcgacgagagctggctcgtcccatgaatcggacggccatcacctggcaacctcatccccggataaagaggacgatgaggacgaccttgatgagctggatgactacatggatgacgacggacttatcagtggacagacagcccattctgcgcagtcacggcctgtccaccgacatcgaccccgtgtaagcgaaagccaccgacagcagactgacagagatgcgccaatccagaatccgcaacgtcagctactacaatgtctccttttggaggctggcatcttgtttcacagcatcttcatcggcatggcgctcagtgttgcgactggcacctccttcgttgtcctattaattgcaatcagttttcatcagacctttgaaggtttcgccctagggtctcggattgcgtcgctcataccggatctgttcgctccgacttcaatgaaaccatggcttatgtcactggcatacggaacgacaactccccttggccaagctatcggtttggttctacacaatctctacgatcctgctagcgcaacaggtctgctgatggtcggcatcaccaatgccatcagcagcggtcttttgctctttgcggggctggtggaactcctcgccgaggacttcctgagtgagtcgagttatgagaccctcagaggtaggcgacgtgttgaggcttgtgtgtctgttgcctgcggcgctctcctaatggcattcgtcggggcctttgcttgagagccttaattattgttcggtgggatttcttcatgatgcctgatagattaacgaagcgagcgacttttcctttgaatgtataccaggttaataacactcttatttatccatggatttcaggcatttgtatgtggatatcccggagggtactcaagaaacacatgcagcgcatgaaacacacttgattcatcctcgcgccgacctaattaatcgagcgggactacccactgcaacgctcggggcctgtatatcccgtttcaccacggagccagcaccgatggaacatccgtggccgatggtgactccagccaagatcgtcacattagctcaatccagcaatcatcgccaatgacaagggtcccgtaaactccagtcctttatgggcttttcgcgcttcgatccccgtctcgcgttctcccgtgatgatgttgacattaggcccaatcatgacgttgttcccaacggaaactaagccacagtccaggacagtgagacagtcagggattttggttagatttgattcttttttctttacaagttcgagtcgaagaaagttggcgtagaatccgctacctatactgatattgcaactgtaatccacgaataacttcaacgagtcgagatagaaatggcaatataatacgaactgaatgccttgacgttgaaatgctggaagatcgaccctcaaactcgactcttctcttcatccgagacaaatacgaagcaaccagtggaattcagggtataaacacacaaggatatctcattaactattctagataccgagaaaatgggtactgatactgcaaatgttcatcgctgcaggatggggtatgtctgcagaaaatcaccgagtatctgccccgtcaaaactgaacttggtatttcacatgcaaagatcgaaggtcgtttcacatccctgtttttttttatcaacagagtttactctttaaatggactcaatcaccagggcgcttgcaccaccacctccgttacagataccaacgcagccaagcttgccccccttggcgttcaagacaccgagcagggtagacacaatacgagcaccactggccccgagagggtgtccaattgcaaccgcaccaccgtggatgttgaccttgtcctcggtgagaccaaggagcttcagattggcaagagccacaacactgaatgcctcgttgatctcaaaggcatcgatggagtcctgtgtcacaccggcgtgcttcagggccttgggaatagctaaagcaggagcagtggtgaacttgctgggcttttgctcggcatcaccccaacccaggatcttggcaataggcttgaggccgagctccttcaccttagcctcggaaaccaagacaacggcggcggaaccgtcgttcaggggtgaagagttgggggcggtcacggttccagtgccagggatgaaggcgggcttcatggcgcggagcttctcaggattgagctaaaagccgtgaggaatggttagtcaaaagccaacaataatttgacgcagacaagatgtacacacattcttgggctcatcatcctgggaaacagtcacaccaggcttgccacggaagccggggatctcaataggggcaatctcgtagtcgaaagcaccggccttctgggcagcctgggccttctcgtagctgcggatagcatagtcatcctgctgggcacggttgaaaccgtggtcctcagcgcactcctcggccgcaacacccatgagatcctgcttgccgtaggcatcagtcaaaccatccttctggataccgtcaaccagggtctggctgccaaacttggtaccgctgcgagaggtttgcaggtagtgaggggtgttcgacatggactcagttccaccagcgacaacaacattggcatttccggtcatgatagtctgagcaccgagaataatggccttcaggccagaagcgcagaccttgttgacagtggtgcagacggtagactcggtaaggccagcaccgatggcgcactgtctggcggggttctgtccaacactataaacgaaaatatgtcagtctcaattgcgctagagtatgtagtaaagttaactcacccagcagacaaaacgttaccgaagaagacttcttcgacatcagaggcattgatgccctcagcccgctcgacagccgctgtaaagtactattagcattgaaggtaggtagaatatagtttgatatgccgtacccttgatggcatgtgcaccaagctgaggagcagtcaagctagaaagggagctacagtaaccaatgtcagatcaagtcttcagggcggggggaaggaagaatataggaatgctcaccccaggaaagagcccacgggggtacgggcagtagaaacaatgtagacaggaggaagagaaggcattttggaagggggaaaagcagaagtagagaagataggaatatacagaagtcgagagaagtgggaaataatccagatcaaagagggaggggcatctataagagtgaaattgtatggtggggagtgaggagctgtacggtgtaggcacgagtactccgaaaaacgctcggaccaagtgaaagttgagatcctcaacttctccgacacgcgtctggagctacagtccctctttttttttttaaccttcacaccttttctctacaattcattatggatgacctctatgatgagtatgtttatttaactcattgaatctacaaccttgctaactgtgcctaggtttggtaactacatcggtgatgcggaatccgacgaggagcatcatgaagatgtccaacctcaagccttcaagtttgatgaggctttcaatgatgaagaagaagaggagataaatgatcaacagttgatggaagtcgatggtatgtcaacgtgtcttattcacagtctaaaatatcgctgattgtgtcttcttccccagagggtccttcgaatgcggtcatattgcacgaagataagcaatactaccccagcgcacaacaagtttacggcgaggatgtcgaaactatggttcaggaggaagatgcccaaccattatcagagcccatcattgcccccgtccagcagaagaaatttgcgattgcagagactgaactcccacccgtacatttctctcgggagttcatgtctgatctcttgaactttccagcacagacaagaaacatcgcaatcgttggtcacctgcaccatggaaagactgctttcatggatatgttggtcaaattcacgcacgacctaacagagcgactggagaagcgcacagggcggaagagggaagaacaactgcgatacactgatgtccatttcctagagagagagcggggcgtgtcaatcaagtcggcaccgatgagtctcgttctcccaagcactaaaggcaaatctcacctgctcaacctccttgatacccccgggcacgtgaattttgtcgatgaggtggctgcctctatccgcctagctgacggtgtggtactggttgtggatgttgtcgaaggtgttcaggcgaacaccgagcagattatcaaacatgcagtattggaagatcttcccttgaccttggtcgtcaacaagatggatcgactcattctcgagctcaagcttcctcccaatgatgcctatttcaagttgaagcatgtgattgaagaggtaaatacgattatcgagaacatcttgccagggcaaggcgagcgacgacgactgagcccggagaagggtaatgttgcatttgcatcaagctcgatgaattggtgctttacattgcagtcatttgcccggatgtacgcagacaatcatccgagcttagactcggcagaatttgctgcgcgactttggggtgacatcttctacaatcccaagagccgaaagttcactcgcaaaggagtggaggagaacgcaaagcggtcatttgtcaagtttgtattggagtcgatttacaagctctactctcacacactaagcgagagccccgaggatttgaaagagactctggctagcgtcggcgtccatttgaagccatctcagcttaagaccgatgccaaggagctgctcagtctggtctgtgagaaattctttggatcggccactggctttgtggacatggttgtccagcacgttccttcccctgtggaaggtgcccagagagcattggagcgatactacactgggcctgtggataccaaggttggggcctcaatggtcgcttgtgatcaagacggacctttggttatccatgtcaccaaactcttcagcagtaccgatgccggaagtttccactcttttggaaggattatgagtggtaccgcgcgacctggtcagcaggtccgtgtcctcggtgagggctacacaccagaggatgaggaagacatggtagtggcgaccatctccgacacgtggattgcggaaacgcgttacaacatcccgaccaatggtgtccccgccgggaactgggttcttttgggtggcgtcgacaactccattgtcaagactgcgacgctggtgcccctgaagctcgaagatgacgaggaggcgtacatcttccgtccaattcggcacatgaccgagtcagtgtttaaggtcgccgttgagccggtcaatccatcagaactccccaagatgttggatggactgcggaaaatcaacaagagctaccccctcatctcaaccaaggttgaagaatctggcgagcatgtggttctaggaaccggtgagctttacatggactgtgtgctccatgatctccggagactatattcagagatggagatcaaggtctccgaccctgttacacgcttctgtgagactgtggtggaaacctctgccatcatgtgttactccatcaccccgaataagaagaataaaatcaccatgattgcggagcctttagatgatgggattgcagaggatattgaaagtggcaaagtcagtatcaaggaccctattcggaaggttgcccgatacttcgaggacaattacgattgggataagcttgcagcgcgaagcatctgggcgttcggaccggatgaaatgggtcccaatattctccaagatgacactttaccctctcaagtggataagaaactcctcggtaccgttagagactctatcactcaaggcttcagctggggtacacgggaaggtcctctttgtgaagaacgtaagttttgacccccccccccccgcctcattcgccaatgaccttgcggtttcggcgcagatgacgaatgtgacactaattgaaatttagccattcgaaacacgaagttcaggctcacagacgtgtccctggccgatcaggccatataccgcggtgggggccagattatccctacagcccgccgtgctgtatactcatcgttccttatggcatctccgcgtctcatggagccgatctattccgttacgatgacaggacctgcagactccgtggcttcggtgtacacagtcttgtcccgccgaagaggtcacgtcctgtcagacggtcccattgcgggaacgcctctttactctgtacgtggtttaatcccagtgattgactcgtttggatttgagaccgatctccgaattcacacacaaggtcaagctatggtaaaccttgcgttcgataaatggagtgtggttcctggtgacccactggaccgggatatcaagctcaaaccattggagatggccccggccatggctactgcccgtgactttgtcttaaaaacacggaggcgcaagggtctggctgaagatgttactgtgagtaagtttttggagccggagctctggaagggtttgaaggaaagtggcgtgctggactcatgatctcaaaattttcactgctcaaaatagggttggctattcggaaggggagtcctttgatccggtgtaaacaatcttgtggtggtagcaaagttcatatgtacttctaatactcatcccaatgcttcttcaagatctagagtcattcatcgtaggcggtcgtgacacgaaaggacctggtctatctgctggtgatatgtcgttacctagggatttgcatcatcgatggattaccccgtttatagtacaaagtggttccgaaatttcaatgacaagtctccatcattttggcaatgacccccatcaatgcaccattctctagggctgcggcaacccgctccttatcagcgagctgcttgttgacctcgtctccggtactgtgtgtaccttctttaattcggacatccattctgaatcttgaggggagagactgttccagacgaacgcggacgccaagaccgatgacggttgccagactgcagtgcgtgattgtgggcgtgatcagcacggtgacagtttgcagaggcgagtcagggacatcaggaagggttggtttgatctcgatatctgggagagagaccacggctaattcaccgagcgagattggatgttccgggtcggagatcgacgagatgagatctgatcgttttagtggactgagcaagggtaatcatctccggggctttttgctgaagagatgtatccgatcttaccatatatctcctgttcatcaataggctcctctagtaggttgtcatcctctgagtcagatgacggggcactctcaaagtctactggggcgaggggcagggccgatgtgaagataccaccatactcggacttgcgagtggcggtgggtcgcaaccgcgtggggagatcagcggaattgaggatcgtagggtttgaattttgcatttccgccatgatgaaatagatacaaggaccagtagagagtggcgagtaaggtgtagtggtagaagggtcagaactgcgataacgtttatcagtttatcatatgttcacgtgcgaagtcttcggtaatgactccgcacgaagtaccgtctgtaaaaccaccctatcttgtattttgaatttttttttttttttttttttttccaattttaatatatcgcgatttagtatattaactatgtagttattataaggaatacatgtatagattatgcattatactgtaattatattgggatcattaacggtcctaatatgtccctatatatccctaataatagggctaaagttctactatgtatgtacggaatatgtaacctgacaatcccagtggctcgggaagatcgacgggcttgaaaatcacttttatccgaagtctccccggcaatttgggcctaattctatatttcaccagaacgtgtctttttcgttttcttttcttttctttttttttttctcgaatatttgggtctatttagaaagctttggagtgtggattgtttatttcttaggtcatttacttatttactttttccctatgtgacactattgcatcattgcagttatagttacatacatgtagtatacctagatacctaggtatatagcatataacacgtacttccctctatataacctcggaagtactccgtgtaccccgtacataataactcattataatagcataatagcataaataactttgtactactgattcactaaggtaacagtatcactcctaagtggagacgccctcatcccttattcaccaactactaatataactcttatatagctattacctatgttgtatatatagatatatgtatatgttatactccgtacgtggaaatcagctggaataattccctgctatagaataaaccaagtataagatcatctactccgtatataatccaaattagatccctacatcccgtatacaacatagaaaatccaatccggatcgcccctccaccctgggaaaatccacagcggcgggcgctattggatcctcttccacaacttggcaccacccctcagcttctgatcttcttcttcttctctctccctctctcacacaatttaattttccccttttctttttttttctttttctcaataaacagccctacagcccattcgccaatgtctccatgtctccacttgtgaacctgggttgctcttcctaatgctccgcgcttcttccacatattccctcccaattgagctatgcgccaggctcgttgattcaaatgtggagtaccttgtgacattgatatcgatggatatgcacccaaaccctttctacttatccgatttgtaagcagttgcccttggggaactctcgatactcttctgtgttgtcttagttgagctggattatatgtgtgggaaccgacgctaatccgccccgtactttaacagcaatcagctatttattcaccacgtgcattccagccccgagtcagcctgattctctttttcggtccagcttcacgcacttgatatacgtcgcattcggtttgccgagagccaaacctctcaaattgccttgcagaacacttgcacttcttgggactttcgcaacttctgccgatcaattttctgcggagcctcggcaagtcaatcacagcctttgagcaacctggagtctgtcatcgaccagcgcctctggggcttgtcgcgaccataactgtttgtctgccccgattaatctgctcggacttcgactactccagcatcccacgattctgcctttgctcttcatttcagacctatcgcctcctgggcgcagttagaacactcgcggcaaatccttatctcgcagggcgagattcgacctctgcattgtctctcacctacaaaccgacaacgtccttcaatctcccgaggcgggtccttgtggatagaacgtccagcacagtcttttttccttccttcttgataccccgatagtcccaataccagcttgagttacctcaactgccacagtctacgccattctacaaactcaacacttgttatcaaacggccaagtatgcaaggttattcgtttgcgcccccagcgggccccccgagagaaggccagaaaagtatgtcccttaagcaccatccgttccttgcatgttgcattggcaactaactattcgttggtgtagactatgtatttgttgatgagcataaccgacataagagattgaagggtatgaaaagcgcccatgacgagtcaacaaatactgaccagcctggcgtttagtgatgcgagcctgtaacggttgccgaaaaaggaaaatcaagtgtgacgcagctacgacaaatacgtggccttgttctgcatgcactcgtctaaagctggtatgtgtccctccgaccatcgggcaagatggagactttctccctgatggccagagcgagcctactctcgagaccggaggaccctctagcgcacctgagggttctcatacatttccggtcgccccgatcttcaaggacaacagtcagccaactgtgaacactatttcctcgtatgatcaaatgagcatgtattcgcaattcgtccctccccaggctcaacccgccatctacaacgatcttcagtcaccacagatggcaatgtcgcaccaaacttatcaacagcctcagatgtttccggggccgcagactccgtctatgggatcatcagatcggaacgtgtatgttgataacgatcagtcaactgcagaaaacctcagcgatgtacttggggagttgaagattgatgagagcgggattggtatggcacattgcctttctatgtattttcccgcgactgttggctaacactcccacccttccatagctccatacattagaaggcaacgcaccgatcgaattgaacccgaggcccctgtccaggacgacgttgaagagcaactcccacctctcagaaccggatcgggcgtgacgattcggattccccccgagctcatgcctgccgaagacgacgttatggcttatttcaagatctactttgatgagatacatccatatgttcctgtcgtatctcgtgcccatctgtactatcaatggcagcatgatcgccattccatctctccccttcttctcgaggccctttttgcctgtgcgggccgcttatctgatgagcccgcagaaggcgcgcagtggcttgccttggctaatagtaagtcaatattgaacattcctgcagccatcctcaaaaactgacatcttataggacacgagactagctttatggatgtgccacgtttgagtactatccaagcattacttctgctactaaaagcaagggaatctttgccaaagaaagggtactattatcggtcgtggcagaccgtcaagactattgtctcaatggcgaaggatttggacattcatgaacattacagtaaccacgctgaaggcaggccgtgtggactgggtccaattgaatgcttggtgcacacaagagtgtggcaggctctcatggtggttgaggtaatgatcggcgggccccaaggtaagtctatctccgtcccatcctttattagaatcaacagcttctaattaaagtaggccgctcggattacggggtcgatcctgagacagtggaaatgcgtccgacgctggatatcagaggtctcgatcattacgagatcgaccgctcaagacaatacgcctatttcgttcgcaatgcgcaccacatccgcataattacagatatctatcacaaagttaagaagcaaaaggactggggcgcagatgcccgatttgtacaaaacaacccgcttttcgcagactggcttcgcaaccttcctccagacctacaggtcaactatcctgccgatggctctccaccgtggcttccatctcattttgtgggtaatatgcattctcattgccacctcgccattattttgttacatcgccctcagcttttcgcttctcaatcttttgcagccggcggtgaatggaagatccatatgtcactgtgctactcctcggcaaaaagcctctgtcgactacaagaagccatcttgcagaggttcgggctatctggcctactttacatgcaaagaggcatcaattttgccatatattgtatcctgacttgtacgatgctgcacctggtaagcatttaacaatctgtgggagttttctttttcgtagcacagacattctaatacgagtaggttgcaattacctcccccgacccggagttcaattcagatgcccgagaattcttcactcgtcatatgagaattctcgagacatgctccgccgcctggcccatgccggagattcaggctcagatcgattcattaagactggctttctccgccgatatgcagcgtcctttcgagttgaagcccagtttcccatacggcagtccctcggaaccctaccatcccagtccacctatggatgcgcactaccatccgcacttgaatcaaatccaatccagagtgcgttacaacccgctcccggcaacccctccgatttcggctggtgctgaagattcgaagtccgacacatcttcccagatacaatccctcgggatggttgcccatcagccttcaacaactcatcctctagatgccccttcggtcgatgaaaatcactgggacccgacccgaatcatcacgtatgtacatgatccacttctctcaacactcgactctcgcttggtctcatactaatctttcactctagtcaatgggacatggccttctccgtgaacccttctaccgtcagcacaaactccccaccaatgcctataaacaattcagtaccgagtgtacaaaacgttatgaacccccaataccctatccaatacgagacacccaacaaagtgccctctgtcacatctacccactctctctcgccttcgcagttccagacacctccagttgtgttttcagcacgagactggcagcaaagtgttgccagtgtgtatgatccacaagggctgaaacggcgatggaattatccagttgatgctagctccgacaataatatgtccaagcgccaaagaggataagacgcacaaataccaaaccatcttacgaccttgtttctctcccgtccaatcccccgatttcccttcttggcctgctggttcttgtctcactatcctagccaaccattgctatcgtcactgtatattccatttttttgttccatttttttcccctgtggaatatttctgtttctttttacactacaagcaccagggacataggcatggcccaatgaagaaaggtctgaggtagagatgcccaaacatcatgacatctcttaaacggccgggatgatagttgatgcatgagtcctgtcgtacgtcaaaagcttgctttaattggtctctttggtagactgaattcaggaaagaattgatagtcgtggaaaagacactgatcagaacgaataaatcctgaaataagccaaaagagaggggtctcttagagcatcagttcttatcaggatgctcgatagatgtgtcctcaacaaaatagtgtacattgtttgctgtactgtcaagattttccaatgtatcattacttctccagtgttgagtcaatgtcccagccaatgggtaaccatagggggaatgctgggatatgctaggatgttggtagatatcggcaaaaagaaacacatgccctatcaatgtcatgatcgtctggtgctttagaaaacaccatgctctattattattgttcgatcactcgctgcatatgctgtcatacgaggaagatggtgtgggatgtatgggacgagtgttatgttttcaacaaagatcttgccctattcatttttgttaatggtgaataatgccacccagagagaaactccaagtaatttagatcatgatcgggttatgtacctcatatccaagtgtcgtattgtggaccaagtcatagcaacatgaaatggtggtctaggggctcaagatcgtggcgtggacagtcaaccgcgccgactaacgccaattctttcttcgcgggtccggacaatcctagccttgtcacctggaagtggtttcaattcatcgctggggtcaaggttgacattggaggttccctttacgtgctgttctgggtgtttgttttcttcagacagtttgcgaagtctggcttcttcaaaagcagcaacatcctcggaagtaatagcaatagctgttggctttcgacgaagcatcttggcagtcagaaaggtattgcaatgaaacaatggaagagttgacaatggggtgtttacttggaagcccggaggagggcggtgactcacgtgactgcaattcttcattcaatctttccgcgtctaacagtatcaagtctcttcgccaaagcgctctaggcgtacgatccgattcattcagattacaatatgtttcggccacagctgagacagatctccctgcactgcgaacgggcaaaagttggtctttctacacctgctcgccagttctcctgtactcgtacagtggccgaagatcgaacccagccatccggtaagtacatacaagggaagcagacattgagataaatacagttgtacaactgcctctcacttattgtggccattgggagtttgaattctgacacccattagacaaccgtaaaccaaattcccgcccctcatcggccacaccttcccaccgacctcgcaatcacaatggccccccagctcggaccaaccagtctcaaactcgtcctcctcgagtgattgacgctagatcttttgcggcggcacgagctagcggtggagagcaacctaagattatccgcagcccgagatcacgcaacgttcgaggcggcaaccaacccccaaatcgcaaacctaaaccctccgccaaagctgccaaagccgccaaaggtaaccgaaacggcccgcgcaggaacgcaagatcttcggagaatgatgagggcgaagatgccgaagcggcggctatcgaccaaattctgcaagagcaaatcatcaaatcccggccaacccctattcgctacgagccccaggagatcaactactctaccttgaaagagacctggccttcaattcccacagacgtgaactcgcgctcggctgctgtctatgaaaagctttccagcctgggcggccgctttgccaatggctatatcgcgccctatgagcttggaaggcgcctatggaagggccagagtgttctgttccacaatgaaaatgataaggccgaggctttggaagagaccaaacgattggctcagcttcgtgccgatcgaatttcacagcgcaagggtgaccttgtggagcctcggaatgtcgagtttagtcccattgacgcagcaaacaccaagtctctcatggaaacgttcgttcaggggaactaccccaagtttgaagtcggcaaagacggacatgccgtattgggagaggtgtcgaagaacctcaggaacaacgggacctaccagacgactgggaagacctcacagttcatggccaagattgaatctcttgtctctgctggccgcaagaccaagagcgtttaatgtgtgtgaactgagtgctagagagtgatttgtattatatttgcttcgttaaccgggttcatttccctatgttcccctatctttcacaattgtgcctatgcctgtacctagattacaaagtattattctacaaacgcccattgccataggctatatgtataatttttcataacccttccttggcttgccaatcgggctttttatgcctgttccaatgttttcttggccccttcaaatgcatccttcacctctttctggccctgctctgtaaccttctccatctggtcgtgggctttgcgcacgtcgtctggccgagctagtttcttcttctgcatatcctgaagacgtttatgcatggcacccctagagtcacgcactacgccggcggccttttcgaatgcttgcttggcagcttggacgttcttgtcccgggattcttttgtaggcggtgggataggaatgttgagctggagggcgttgtggggatcaggctgaggggtcaaggagaggtttgaggagacaattgctgaagtaagaggtttcaagtgctgctcaaagtgtattagtactggttccctattggtacagcaatatcaggctcacgtccccgacaagaaaagaaatcagtgcggtcgagtggcatgaacttacatcctcttcggccgccaaaagagtaaccatgcgtcctcccttgggcacaacctgcgccagatcccccaatttgactgaatctttgctatctttgctcagctggaccctcaaactttctaggactgcggtattgaaacgccctcctgcgcgaagcttggacagatcatcctttagccgagcaacagctgtggaaatgccattgtgtaattgggaaagatcaaagggatcttcggaaggagcgctggagctttcctctggctcggaagctgaagctgaagcttttttggccttgtcctttttcttgtatagggcaggcgaattggtaaactcacgcacgttcagaggaacgccgcgctgtgttcggggtaggagacatgaaaatcgaaacacttgcgtcccttgagggcgcacaacaagacgagggcaagaggagcgaatggattgggttataatgcgttgcatggtagaagtggttggtgtagaaagttgtgaggcggaggtggacagttccgaagttatctctcacgttacccgcctttcagcctcgcggccaaaaaagaaaagaaaaagaaaataagaaattcaaccccaatattaccatgcatggtatagaactataaagtgttccaattattacgaaaggagatcatcacaatgtcattaaattgcagatggcgaacttcgtctacaaaaaacaaatcaaatcatacttttcaagaaaagaaaactgcgcccaagttgcccggcttcataaacaaagcgtgacagagaccaactctgcccaaggtctacatggtgcagattccctgagaagcagagtcccgggaaaaagaggaaaattcgttggccataagtctatgttcatgtcttcccatgtatgcatttaccgtgtggccatggccttggtgatcagacgcttgagagcaagctccttcttcttaaggtcctcgggggtggagtcctcaacctcgagctgggccatggcgtcactgagagcagactcaatgcgctccttgttgccgcgcttgagcttcatggacatgccagggtcggagacaatctcctcgacacgggagatgtaagactcgagctgctggcgagactcgaagcgcttggtgaaggcctcgtcgctggtcttgaacttggcagcatctacattaaagtcacgttagcatatagtcaaaaagaaatagaatcaacagagaaaacataccgtcaaccatctggtcaatctcggcgctggaaagcttgccaacagcgttggagatggtgatgttggcagtgcggccggaggtcttctcagtggcggtgaccttcaggataccgttgacgtcaacctcgaagacacactcgagagcggcctcaccggcgcgcatgggaggaaggggagcaagagtgaactctcccagggaggtgttgtcagcacagttggtacgctcaccctggtagacggggaactggacagtgctctgattgtcgacaacagtggtgaaagtgcgcttcttgatagtggggacggtctggccacggttgacaacgggggcgaagatgttgccctccatggcaacaccaagggaaagaggaacaacatcaagaaggagcagatcagcggtctcggcagaggtagccttgccggagaggataccggcctgaacggcagcaccgtaggcaacagcctcatcggggttgatgctctaagagaaagttgtaagtaactaggcttagacgttagataaagtggtgctgtctcgtcttaccttctcgagcttcttgccatcgaagaagtcgctcagaagcttctgaatacgaggaatacgggtggagccaccaacaaggacgatctcgtcaaccttgttcttaggaattccagagtccttgaggacctgctggacggggtcgagggtgccagagaaagccttggcgttaaggtcctcgaaacgggcacgagtgatggaggagttgaggtcctcaccgtcgaagagagagtcaatctcgacggtggtctgggtagcgttggacagggtacgcttagcacgctcgcaagcagtgcggagacgacggagagcacgagcatcaccggagagatccttgccagtcttgcgctggaactccttcttgaagtgctcaaggaggttagtatcgaaatcctgaccaccaaggtgagtgtcaccagcagtggccttgacagtgaagacaccaccctggatgttcagcagggagacatcgaaggtaccgccaccaagatcgtagataaggacgttgcgctccttctcagacttgccggcgccgagaccgtaggcgatagcggcagcagtaggctcgttgataatacggagaacgttcaggccagcgatggcaccggcatccttggtggcctgacgctggttgtcgttgaagtaagccggcacggtaatgacagccttctcaaccttcttgccgagcttaatctcggcgacctctttcatctgtgccaactagtcagcaaacaaatcccacaaatatgacatatatatttcgccataccttcatgaggaccatggaggagatctcctggggagagaagaccttggtctcgttaaggtactcaacctggacaacggggttgccaccctggtcgatgaccttgaagggccaggactcaacatccttcttgacgatggggtcctcgaagcggcgaccgatcagacgcctgttccatttgagtcagaacgaatttgtaattgtggagaatgcgcatatctcgaattgatgggctgggcaagagattttttttttttccaactcacttgatatcgaagacggtgttggcagggttcatggcggcctggttcttggcggcatcaccaatcagacgctccttgtcggtgaaagagacgaaggagggggtagtgtagctaccctggtcgttggcaactgatcaaatagtcagtatttgagagatttgagagaaagatggaaagatcgaatttttggggggggaaagcgtactgatctcgacattggtgccctcgtagttggcaacacaagagtaggtagtgcctaaaaacgaaaaatggcaattagcggctgtgcgatcgaatttagagtagcaaaaacgcaccaagatcgatgccgacagcaccgtcgtaaacctcagaatcggccattgtgaaattttagatgtgattttgagggaggaatgggaagagggatggtgggggagagaggaaattttttttatcaaagtgcattatttagtcggagccacaaaaaaaaaaccagaaaatttttcggaagcggtgagtcacgtggttccggttattctcacccgtgtacggagtacaacataggtagtatattacatatattacatactatatactatatactagtagtagcatacatatggacatctattgtctattataagggtacatttgccttaagatgtctaataggtacaaaattatacaattcgctattctaattatctatgtactccgtatttcacacttcaactatcaatatccatcggatcatcgtataaatcctccgtagtcttgttctctctagctcgtgctcgagattcaagaattgcctttcgaacattatctttttccctgggaaccgtgagggaagatggttccgtataaagaacaagttctttacctgagggtttcgagtcggatagaacggattgagggactgagagcactttctccgcaaatggtgaaaacaccaaaccaggagactcggcttccattaattcttgatccaggttgtaaatgtaagtcgtatgcttggtgtcatccaagatcattgcatcgtttgggtcagaaagctcatggttatgtcgattatgttggtgatcaatgtggtcaatgtagtcatggtgttggttatgctggatatgccccttgggtttggcccgagcggagattggcacgctattatctacaaaatatgttaacttgaacaacttccacaacctccaacctcaattgcctacctattcgcaggtgtccaaatctcttcgttaacggttgtgcgccatcggggtcagcttcggccggacgcttcttcccgtgaccttcctcacccgccatccacactttcttatctccctctctttctctctctctcttgtatttgcaagtgtgtgataataaagcaaatgaaaaagggggaaaggtggttgaactaagtgcacagatctggagtcagattcctttgctcgatgcgggtttctgggttggtgacgaacggggaacgggctttgactcatctctttcgcagaaatcaacccagaacattctcctcttgctttgttcactccctggcaaccaaccctcccacattcgacaggatggcttctcccggctcagaatggactgctcagcgagtccgagatacctttttagattattttaaacaaaatggccatacatttggtgcgttgagcccattcctttttttttccccctacccctccgcccccgccaacaacattgactgacctgaaattcctctatacagtcccttcttcccctgtcgctcctctatcggatccgactctgctttttaccaatgcgggaatgaaccagttcaagtccatcttcctgggcaccgttgatgcctcgtcggactttggaaagatgaagcgcgcaacgaactcgcaaaaggtattggatatctccacaataactaaaatatccgacttgggactgttgctaatacaattggatagtgcctccgtgctggtgggaaacataacgtgggtgtgccctggaaaccgctagaggggtcttagaaggagtttagtatactgactaacatgacacaggacctggatgatgttggcaaggatagctaccaccatgtgagtattggaacccattcctatcgtcaaatagaagaaatgctgacgaaatctctagaccttctttgagatgctcggcaactggagttttggcgactacttcaagaaagaagccatcacttattcgtggaccctgttgacagaagtctacgggctagatcccgatcgcctctacgttacttactttgagggcaatgaagctggtggattggaaccggatctggaagccaaagaactatggaaatcagtgggcgttccagaatctcacattcttcctggagatatgaaagacaacttctgggaaatgggtgatcaaggaccatgtggaccttgtagtgaagtgcactatgatcggatcggtgggcgcaacgctgctcatctcgtcaatgaagacgacccaaatgtgcttgaaatctggaacaacgtcttcatccaatataaccgcgagccggatagctccttgaggtccctccccaacaaacacgtcgataccggaatgggctttgaaagactggtgtccattctccagaacaagccttccaactacgataccgatgtcttcactccgatcttccaggctatccagaataccactggggcccgggaataccgcggccaatttggcgccgatgacgccgatggaattgacacagcctaccgtgttgttgcagaccacgtgcggactttgatgttcgctatctcggatggcgtcattcccaacaacgaaggccggggctatgtgattcgccgtgtcctacgccgaggagctcggtatgcccggaaatatttccaggtcgatattggaaatttcttcgccaagctagtgccgactgttgtggatcaattgggtgagatgttccctgaactcaagcgcaagcagcaagatgttgtagaaatcttggacgaggaagagttgtcatttgccaagactttggatagaggtgagcggcagttcgagcaatacgctcaacaggctaaagtcaaaggcaccgatatgctccatggtgccgatgtgtggagactgtacgacacctttggcttccctgttgatctgactcgaatcatggccgaggaacgtggtctccgcatcgatgatgtcgaatttgaagaggctcgcttgaaggcgaaggaagccagcaaaggtcaaaagaaggctgctgagaacacagtcaagcttgatgtccatgatctaggcaagctggagaaaatgaacgacgtacaaaaaacggatgattcgcctaaattcggccgaggtaacatcactgctcacgtcaaggctatctaccacgggaagactttccacaagagcactgacgatgtccccgagggagcacagcttggcatcattctcgactgtacgaacttttatgccgaacagggtggccaggaaaatgatacaggcaagatcatcattgacggacaagcggagcttgaagttggcgatgtacagtcttacgccggatacgttctacacaccggcttcatgaaatacggatcatttactgtcggcaactctgtcatttgcgagtacgatgagctccgacgctggcccatccggaataaccataccggaacccatatcctgaacttcgctctgaaggaggtcctaggcgatggtgtcgagcagaagggttccctagtggccgctgagaagctgcggtttgacttctcccacaaaaccgcaatctctgatgccgagctcgagaacatcgaagcgaaatcgactgagtatatccgacagaactgtgcggtttactctcaagaacttccgcttgccactgcccagcaaatttccggcgttagggccgtattcggcgagacttaccccgatcctgttcgtgttgtctctgtcggtgtggaattggaggagatcctgaagaatgtgaaagatccccgttggcaggaagtcagcatcgagttctgcggtggaactcatgtgcagaagacaggcgatatcaaggacttgatcatcctggaggagagtggcattgccaagggagttcgtcgaattattgccgtcactggagaggatgcgcatgaggtgcagagagttgccgaggaattcggacagcgtcttgatcggctgaacgcattgcctttgggctccgaaaaggaacaggaggctaagcaagtccaggtggatctcaaccagcttgtaatctccgccgtccaaaaggccaagttccgcgaacgctttgccaagatcaataagcaggtcctcgatggccaaaaggcccaacaaaaactggaatcgaagaaggcagtcgaggctatcacctcgtattttgagacgcccgaaaatcaagacaaatcgtggcttgtggtccagcttccgatctctgccaatgccaaggctgtcagtgaatccctcaaccatgtcaaatcaaagatgcagggtaaaagtgtctatctcttggctgcggactctgaacaaggtcgggtttcacacggatgttacatctctcaggtgagtagcaggctacataagtctttcccatgttggagttggggaaagcaaatagtaaaatattagagattcttatactgatttggacacagggactgagtgaccaaggtgcttcggcaagcgactgggcagccgtcgtctctggcgctgtgggaggaaaagcaggaggaaaggggcctacttccattggtaacggtaccaacactgacaaggtcgaggaggctatctcactggctgcggattatctgaataagtttaagctctagacctaagggcatgattctgtgaagtcttttatccttttttttttttttttttttttttttttggtagattcggatatatcatatctgtgccgatcactatgaaatatccgcaaaacggtcctggttactgaagccatatgaaattgatatatttccataattcggacacttttcccacaattctaggagctatagatttgtaggacgtggctgtttcacagatatcactccatttgtgtaattatcattacatctctccacattgcacaatcgttacatcttggttgggcttgtctttagtagtacgcgtgtgttcaaccattttaaggagatccatcccgtcaatcacctggccgaagaccacatgcttgttgttcaagaatggtgtggccgtggttgtgataaagaattggcaaccattggtgtttgggcccgaattctgttgtcgttaatgaaaattcctacaatatagaaagctagacagctagtctcgagttcagacttacagccatacttaacaaaccggcacggtcatgtgtgagagtgaaattttcatcagcaaatttcgaggtgccgtagatggtacatgacccagtcccatcgccattgatgaaatctccgccctggatcatgaaatctttgatctgcagcgagcattaattcggtatcgatatccaaggagcttcatcaacttaccactcgatgaaatttgcttcctttgtagccctggggttgccctttggggttcttgctctcgccagtacaaaattgacggaaattctccgcagttcgtggggtgatattggcgaacagctccattttcactcgacctagagactcgcctgtggttatattagcagggttcgtcaagttagatgactactcaaatgcctaagccatcacatgcaaacaatgaaacctacctccaagggcaatatcaaagaaaaccactggattcggttcggccatagcgaaactggggttgtgcagatgtgatgaagagggaagtttgcattttgatagaccccccaggtgaagcaggggatttcggaaggtacggagtcaaattagtggccatgcaggactttatattgaccacctctctgggatatacatgtatacattacagccttctttcattttagagataggaaggtaactggcattttttaaaaggactacgaaccaagaactacctaggtacagtgggacctccagaatatcgggctgagcctttatacccagatataccaccctcccaaattctgccggtccttctgaatatgggtaagcgtgcagccacgtgatccagcgctaagaggttagcagtcgaaaggcatgtacctaaggggactgccaaaaaagacctaagaccactgaaaaggcgcatgaaaagactgccggagaagactaactatgtactgaggagacaactaagaagactatggccgactatgtattcttatggcagcatgtttaaaacatggaggcggtatatagttagggcggtatatctaggtaggtacaaaggtttagcccaatatttcggaggtcccactgcacctttgaagtcccggagtgtactatatcaacctctcatacctaactacaattcagtatgaatatataatgaatataagcatatcctggaactgatcatacagatttcattagtcgaaatgcattattgtatacctaggtacaaattgttgggttactgaataattgcctacgtgtcatactatccatacctagatatacagtgattccgcattaatcctaacatacttgctctgctaaaaatcacattgactagaatgttatttccgaggcacaaaatccttttttataccagatacttacgacacttcagacgccttaaatcactacttgataagcggtttgctaggcggtacatagagacttgatatgggaggtgaggggtgttaagattaatgcgtactgactgtaagtacatgtactatacagttgtacaaggtaaacgtgtatttacagtaccagatagttgaagccttgaaatgttctatggccgctgcaggccatcattatatgtaccttggaaggtggttacatatgtaagcaataacatgcacacaatatatttccaaataaatagaagaagagaaaagaaaagaaagggtgtaaatagcccttgtctcatcccctgctcagagaaaatctacctgggaagactcttaacagtcccgtgatccacagcctcaggtgtcagtctctatcattaaaggcctctttgatccactttcactctatctttctatctctctactccgtatctccctctctctttctctctttctctctttctatccttctcttcccccctctccctccataccctccctctgctcttactaccaataatgacatgagatcgaccctcggcattcaccttctcttcgcaggaagttctgtgtgttctgcttgcggtcgatcgtctgtgacaggccatcaagtttaatctccaaacattctgtcgcatggggggtacatacccttagatcgttcctatccaccttctcgtcgccttggacttaatctgctggagtctggcccggaatttacatacagggttgccctgtacacccaactcaaggcatgaaggatcaaacttggggcaactgagacttccaacaataatcgagtgacgccgttccgggtgggaccagcgcggtcattttcataccgaaccttagtcggaatgtcttcaacatcagcctctagcagtgctgccaccactactgcaagtagcggcggagagggttcgggctcgaataatgctacaagctcacctttattattcttcgtcgctcttggcttcggtgttgtattcacaaatctatggtatgtcgcttcatattccctctgtcctgttctagcatttcagagatggcatctgacggtcatcgcaggatcattgtgggagtcaaatactgctttcgatacaatcaacgaaaccgtcagctccgcagtgaggaagtaggagagcccatagacttggtcaccatgccacgacctcatcgcaggagaagggagaaacggctaatgacgatggacgaggtaaacgggcggtttccactcgtcaagtacaaagtgtggaggtcatctcgcgccaaccagggtctttcaacggaaggaggtatcacggctccgaatagcagaccacagagcctaaaagatgatggtggtatcgtgacaacggcggttgggtttcacacagctgcaataccaccatccatcaatggccatggccacgtggattccaacgacacatcacgaactcccatccaagagctgcaagatggcccaccagtgcagacttcggaagagaagggccctacagtatctggggtgccttctactcagcaatccaccggtgcaggtacgcaggaagagaaatggcagcaatccttggcgaatgaaaacatcaacattgatctcgagggccatgatgctgatggtggtgcctatattcgtaatgctgtttctgctgatcttctgcccaaccctggcgattcttgcgcgatttgcctggacatcattgaggacgatgatgatatccggggacttgcatgtggacatgctttccatgcctcatgcgtcgacccctggctgaccagcagaagggcatgttgtcctctgtgcaaaaccgattactatgtacccaaaccccacgcacagactgaagcacagtctgtcatggatcgccagggtcgtcggatagcttgggaccatccggatgcaattcccaggcctcctcgagttgcttggaatggtggcagggcaaatggattccgggctcagatgggcttgcctagccgaatatttcaatcgacaccggagggaagagacatatctacaacccgggaacagcatgtgcggaatgggcatgatcagccttggaacccagcccatgcctcaaattctccgggtcaatccacctggtctcgattcgttcccactcgactccgccagagttccttccattatccctcgtcaagaagaccacctgtagttgggggttcacctgtggatccactgccttctgaaagacgcacacctcgtcaagtcgaagctggtaccacatgatagatcttggctgctacccttttcataccccatcacgatttgactaatcttcattttcatgccggaaccacatctggaatgttggctggagttttattttccttgtttatgacttgatatgtgtaatttatctttatttgcgcaacttgcactggagcacatgtggccaccagccgattcatgaattgtctttctctgtctctcatcctattccatgccatggggaactttgtcctatggtgctactgcagccactgcttctccaccaattcttagtccatttagcgggctgaatggtttgttactagttgaatatctatatgtctcttggtgcgcaacaccagagtacatagtaccgtcttgtacacattatacaacatattcttctcttataggttaagggataaatgaggcaaagaacatgaagccctgccccctaaaaagatggcaaaggaagaaaggaaaaacaccccctaacacctatacaggtccatatgttcacatctgagacttaggaccacctacaccagcgctgatgacactgggtagctcctgtgagcccatactgaaaagcatcccaatcgcactagcaaccagaacgatgacaaacagactcacccctgcaacgaggaagaaaggtgagctgatgtctcttttctggcaagctgatccaccccactgaactgtcttgctggtaccatcactattccgaacaatactttgtttgcattggcatgcgaaacaattgcctgtagttccctcaacacccgagccgtatttcagatagcaggaaccatgcccggagcaatcattggtagattcggcacacgatgagtttgaagcatgacagataggcgctagggttgactgcagtgcagaaatctgcatcgacctcctgaaggcgtttcgttggctgactggtgccaatgattgcttcgcgcctcggcggctgagtccttctgatttaacaccagcaggtaaaaccacggtcgtgatttcacggtggctggtcgatgatatttgagctaggtgaagaagcaatgtctctaggagcttggttccaagagaataatcaccagacatatcctgaaattggtggcgtcggatcagacatcgttcactaatgagataggggggaaagtcgataccttaaaggacaacttcagagccgaatccttgtgatccttgcttgcccaggattccactgaatcgactagcataatgaagtcacgggcgagcagatcagactcatcatcaaacatggggtccctgaataggcattcctcgggtgtctggtataactggaagattagcgagagcaccttgatactattaaagttggctttgctacctgggatgtcgatgatgaagcccttccagcatcgttgtagtatgtacacatttgtccacggtcctctttcgcagtagtgctgctttcggtaaatgattccaggagatcaggattgataaatggtgaggaaatttgaggaacatgaagatggtctggttgggcttgttgcatgactagggctgcagggacattagccaatgtttccagtcaagtgtgaatccacctccacttaccaacttcctggtcaatcccttccaaaataaagatgcttttcttgaaagcaatccccccggtagctcccccaaagagagtgggatcatcctgagcaaaatggttcaagcggttcacagtgtctccatctaccattccgaggaccgatgctacagaggacttcatgcgtagctccaagaccagtcgagcctcatcttctgatattgtttgtcggttgggattagcagttggatagcttgctgtcttgggaggaaacgtgaagattgtagcatccagggcatttgcttgcaatgcacctgttagtgccagggcaaagaaggcggacacccagcgcatattgctagaatcgggagggccagatgtaaaataagcctaatttggcagacgtggcgatgcccacttcaagactctctctgggggttatttggtgttttgttgggtaaaacagcgggcagtcaaggacagaataccatttggcttacggacccgtggacgacttgggggcacctgataagatatcactaaaaagatatcacgtgatctactgtgtactacatgcaatgtccatgtcatcaatctctagcccaggagtttgttccagtagtaatgccattttcattttgagggctcagcactagtgcatgtatgtattatagtagtgtacgtgtctagttacagtgtatatgcggtaggcaacctgtggacgctgcaatgccgcatgttacataatccactaaaccgccgagcctttcacctcacactcgcaagccagatcctcgtgtatatcagtcttcaaggattctgtccattcctttttacccccaaattgagatgatactctagtgagaatcattgcagggattggcttttcccaatgctccggctcaggtatctgcttcgaagtcctcacgcacgctcgtctctcttcagtcctacacaccctcgttccgacttttcaaaatcacaaaatgtacgacgtgtgaggtttagacggccttggataaggtaggagaccccatcttatagcaaaaccaatgtctctttggtcagactgacgtagaatccctcaggtcgttcatatcaaaatgtcttctgtacggcaccgcattccacctctggagcaccttcgtgctgatacgatttgatgacgacattgacgatgctgatctacctcctgtgaccaacccggatgggatagccccacgccaaacctccttggaaagcggcaaaataaccgggaaagaagccaaaaatgagggagcgctgttcataccgcttggctggtctcgtttgcaacaaggcgagctgtacactacatcagatccagaatggcaagaatttgtgaagttatccaaggatcggaagaagcttgagaagcttaggggtgaggaatcgatacaatccccgctcaagatcactcgcttacgagtatagatgaactcgctacaatcgttttagacaatgcggggaggcagatgtcacagatacttggagagcctctcgccctcacgggattctggcttgtccatcagtttccaaaccgtgcccctccgggatatgtgcgatcggggtatgttctgcttatctctaaaggtgtggttcttgtactgacagtagacagggtggagatcaaagacgacagtatatcgtgggtcgcgaagccgatggaccccgaaataggcgacaggttacagaccttcatgaaaccagttcatgttgctctagcaatcagagatgcgtatctggtactattactaaggcaattggatcgtttcaggaaacctgcaggggagccgctgaatgcctttgatttgttgaatgatttttctgccgcgcccggtgacaaaggagggaactggattagccaaaaggatcagtctaagctacaaccacctctgggcgacgggctcaaagaaaatatgccgcctaataccgagaacaccaactaccacccatcctccctcatatctctattacagcggctaccgttaccagacctcggcccgggctcggatctacacttggcatcacaggcattcaaattacgcttgaaccatgaacgggctcaaagtccagggtctgctcgccgtggagccttctttatcacgggtccagtcgggttgaagggacctaacgggttttgtcgatttgaggtgaaaggcgagtatgatcctgccaaacgtgaatggcgaacagtggaaatgacactcaaggatctgaacatgaggagacagaatgcattaggaagttgatcacatatactcaggactttttaagtgttctcatctcaaggcctaagatattctagtttcccttcaggttcacggattgtatgttgagcttaagactcatcttgacgtctgtatgaatactactatgtaggtacatgtttttccgcagttctagtgactcagcacaaattcgagatcacttctatatttaccacaagcagccatggctccaaatgttattaatactcggtgcccgtgccttttccaggtgaatatataaagtactaggaggcgcatctttcaatgcaagcagggactaccaaggttgggcttgaatgacactctcaaggggttatttacaatatgcatataagcatataaatctatattactaccaaaaggtccacgggtccacgggttgtagtgtgtattactaaccttggaagtacccgtggaccctatgttttacttgatcagcttgatccttacttccgtcactacctagcgcaatacaacatgtccttccgtggtaaattatatgcgcaacaaagacgccatgcgaccaactagcgagagttgtaggcagcgtgggaatggaaagaagttacttgatttgctaaccattagcaaaatacctaggtaggcaactaaagctgtgaaaccaaacgaccgacgacgttaagtggatggtccaggtatgcatatacctaccttcctacttctccactccttttgtgaatgcttggtctgtttgcttcccctcaagcatcaactagaggaaccaagcagaggaggtacatgccccccactcacaacacccttcgacataggataacttcactaggatgatattccaagattctcacatcaacttcaggaaccactgtctagtacggagagttcaaaagaacgcggtttagtggtcacgcgagaacagtccaggtgcgtgcgataaggcagatgttggtcttccggatggcatgatagagagagagagagagagagagagagagcctggtctagcgtgtcaatgaaatggctggtaagaagaaaatgaaacttggtctcattccagaacttcaattgtgaagcttttgtggacgctaatgagcaatattgcgaatgcgtgtgcctgccatgaacgaacataaagcaatgtcttctcaactgctcatatctccaagtacaacaccgccaatcaatgctaacttattgttggagggggggttggtagttaagagggcgcctacacgacggtcagtgatacatccaagggagaagtttgcaattaactgacttgaacagtaagatatgaggttcaggttcatgaacctcgtaatgctcccatcccaagctctgcaagcaattgttagaacccatacaaatcttgagattatgctcaacgtacttgtgtaatacccagagctcgccattcctcctcccaaagcaatttcagagtccccttagagctgtcaaagtagtctgtggggatttttttgagcatattctttgggagctgcacatggcgatattcaaatttgtcgtcgttgtatctatatggaggagtcaatggagagtctaccacaataccataaggtcctcaccttgccgagtagtgaatggagtccacaaattcatcaagcttctcgcgctccgtctccaaaagaagacggggcttcttgttgcgccgagctgggtcgatgtccattgggatagcggaatgagaagaaatgacagaacgaagatatctgaggctatacagattgtcaatatcagtcttctccatttgttcaagcaacaaggcctgtaaataagtagcctgaggatgcggctcacaatgtggctgaatgattatcgcatgtgacggcaattgaaaacgtacactcacagggtaggggccctagagatatgtaatatgacgttgtatcgaaggaccaaagataccgaggatgagtgatcaggtgagtataagagtgacgcagagagaaaagagtgagggttgtcgaaacaacaaccaccgggcttgttttgcgggactcgggaaaatagtgggggagggaaacaacaattggatgcctcaggtatcaatccagtcgctgttgttttagccacgtgatcaaagccaaacgaaaattacactgtggtgaaagccagtatagaaatttacagttgcttcaatgtccaacacactgtacatagtaacggaatgcaaacatttgatcaagtttgtaattatggtatgtattctttcgtaccattctgaattatataatatcagtggacccacttccagggctgcgggtcaggcttacctaatgtgggatgaaacgcgtcggcaacacgtcttaagacgaggaatgtctatgcggacatctccctttgccatactctatcactacttgtaattctttcaaacaattgacactctgttaaattctgtattttcagtccctctgttggtattttgtcacaaattactatcttcaatgtgtgacttgactcgcgactcgggacgttatcagaactaatccaagatgacctcgaaacgacgggcggctgccgcagcttctccagatatgaagtttcgtagaacgaaacgccgaaaggtttccgtaagtatcaattgttgcattaagcacatatcgattggccctttctgcttgcatggagggcaatcgcgacatcgttactatgacagttcgatctacgctgttcaaatgtctctattcactatccgatgtcgttgttttgcacatagatcggatcgcgtgtttcaaatgctgacccaagctgcggtgggtgtgataggacgatgatcccgtgtctcccgaagagtccaatcatgcgtcgtcgcatccggactcagagtcactagaggaaccagatcgaaccccggagtcgcaggccgagcccgaggcagattttgaaagtgatactcttcagagtgcacaggacaagattatgtccgagttgacccgactcaaggattctgagttggtatcaccgatcctgagcctttgcttaaagctgacaccccgaaccagtggccaggatgtttcttacccgttcattgggaagccagaccggaacctataccgggattattatgagatcatccaacatccagtgtccttacgaagcattcaaaaaagagttcgtggtaccgacagcaggaagaattcatccagaaccaccgcatatcctacatggcagtcctttgaagaggaggtcagctatgtatggcgaaacgctagggaatataacgaagacgacagcgatatctctattctcgcgggagttttggaggtaagcctataccgcgaggctctcgccatctgtccctttcggcatgctgacactagaggcccaggatcacttccaccggcgggttgccgaagctaaaaagcttattccggacccccttgaggtagatggagcccctgatacgtcttgcatcaaattgaaagtgggcactgctgtgcccccagtggcgcagaggttaaccttgaaaatgcctgggcagagctccgatacactatccaaaatcgatggacaaccctcagatgtcacatccaagaaccaatcccttagccataagcaggatattgccggggctggattagcaggtcaagaaatcaatagaattcctcgaggatggtctcttggggggcagcttgatagtaccaggtcgagcaccacaaacacaccatctggctcagagaaacaacagaacagttcaatgagcgcccaaggcttactgagctcggtgaccaaagcaaatgccccaacaattcccacttcgcaaaatccacccaacgcgtcttttggtgtttcttcagatatcgctcgccattcatcttcggcttcaggtacgttacgcttggtagacatattgtcgccaagtgcaagtgttcctcggctcccggcctttgctaactcattgttagcccatgttcttcaccagctgcatcttggttcatcgcccatggattcgcttctgaggcgatcaggccaaggtttgacttccactggatttagaggacttctagctaactacaagtcagatccagggatggctttgattcgtaatgttcgggttctcacgcatgcctctttgtcgttgcagtcggacttctgcctagatatcccgccttcgtcgcttatttcacaacagaatatcacgatccaccttcctccgtcgcataatatactgacggtcaggcctcgtttagcggctagtacctcccagagacaagtgaaaattattacactcatgggtatgcagcgtcttcattcatctggtgatggggctacactttcatatgatctccatctgcatcctggcatgacaagggtcgacttggaagctattgctgggcctgccaaaggagtcccgaagtgtggcccacctgggtcagaaattgattatgaacgtgttactctattttttaatttgttacgttgactcatgtcaagcaaactagtgttcgtttaataaaggggtggtgatatgttgtttcttatactcttggaggttataggggaaaatgataaaaataagtaagaaaaataaaaaaaaattctgatgaaagtgtagatcaatgtattgacatgagaaaaaccggttttctcctatatttagggccgggaccccctcctgcctgaatttttagtaccgccttcctaatcgggtaccgcttttacctcggcacctatatctgcctaccgacctcctcaccgcctttaaatcctcacaccgcctttgtgttaaactacccctaacactatcggactatagcagatacctacaatttgtatataaatatatagtaaaaataagtcacttttgtcagcacctatacctagcacgatacctagcactatgcctaacaccgagtcctaagatgtgaatatagatgtgcgaaggtgtcaaatgtgacctaccagatctttatgaaaaagagtgcaatttgttcaaactattaagtatatggaaggaagagaaagaaagaaaggcgttagagatcacgtgactgggtcacgtgactccctttgctccctcacacattagctagctagttcagatagtttcctctcttctccacgcatattatcactttctagagcataatgttgaacgagagaagtgtactatatgacttaatactactactatataacggggtaaggaaagtaaagcgagtgtgttttataaaagagtagatatacttagctatttaacctatattaggcttataaagtagcgctaatagctaggcaagtgatacctaaggctagtaagtgtgacgatctggaggttcttgcggtcacgtgataatgtttgatatttgtttccggcatatgacagactagagtctaggacgaggttcgatagagatttctgcctaaagtccccgactagaggtctcgacgtataaaaggatcttatagtgtcgatcctttcccctttttctctttccccccttatacttagtattctaaatttaaatgcactcttttcttataaagaactagtaggtcatataatactaagtacctctcttaatttctttataatagtacggctatataaactattaatttaattagtttcggccctattatatccccactttcgtttcttagtattatatagctaagaccttaacctatattaatcccgaacccgtaccgaactaagaactactaactaattaagatagttagtctaagataaaacctacctataaattaggatagatagcctatccctatacttaataaagagactaaataagaaactatcgctacttataacctatataccctaacccctaatctatagagactagttcatactagtgaatataataaagaagaagaaccgattagtatatagttatactagatactaagaagtgaaagatttattaagcttacttataattactaggggaagcgctgttggcaatggagttaacctgctggcaatggactagtgcccctttcggaaaggtcgctcttagcagtcagttttcaatacgagtgccatttattatggtattgccttagtaaaaagacacagcccccgaatatctccagccacagagtatatctacagtcggtctgatctttacacacccccccccccccaaaatccttccgtttgatttacacctgacggatattttaggaggatatctcaagtttgttgaacgcgagttcaatgagaactatcttcccgtttggatgcaacaggcaggctatgatacctattacactggataattgatgaacggtcactctattgagaactatgacagtcctcatgctgcaggcttcaatggatcagactttgttctggacccttacacctatgactacttgaatgccacgtaccagcggaatcatgaaaagcccgtcaattacctgggccgtcacacgnnnnnnnnnnnnnnnnnnnnnnnnnnnnnnnnnnnnnnnnnnnnnnnnnnnnnnnnnnnnnnnnnnnnnnnnnnnnnnnnnnnnnnnnnnnnnnnnnnnncccccccccccccccccccccttttcgtctgattatgaagtgtcggccggaattactcccttcccgtacgttcatttagtcttttactttctctatgtagcagccaccttaggcatcacttactagccttaggtatcacttactaagctattagcgctactttataagcctaatataggttaaatagctaagtatatctactctttataaaccacactcgctttacttttcttacccttattatatagtagtagtattaagttatatagtacacttctctcgtttattagttataagcccggttagctagtaactctttaaaaatacccttatcgatttataacgatatagtcgcttactagaaagtactatacccctaagtataaagaaggttaacgctataccttacttctactaacctccgaagacgaataataaagaaaataacactatataacgctaagatatcactcctttataataactttacttctttaaatattcctaccgatataggaagtaccctaagggtataaattatccttaaaaacttagtataatagcggatctagattatatagatagagttaatagctaagaagtctaacgtttaggaatatatcgatctaacgctcgaaaacgagaaatagctaaagatactagtaaagctagtttaactagactaaagtagtaagtagtataagaaagatctagagataaagcgccttactatagaaggaagaatagattattaatataatcggaaggattataaagtagatcttactaaatataggattatttaactatctttagaaaaggtagctaactagattaggaatatactagctattaacctttagtacctaatagttaatattaataatataaagaagctactttaaatactataaaaacgctttttattctctaatatagtatagatctagcttctttatagattatagtataaacttctttttatacctattaaagactctatagttaataactagcttttaagagttaagaacctttactaagaatataaaaaggtagagattaaatttattaaagataataataatactatttataaccttttctaaacttatataccgctagaaccctaattttactactactaatagactaagatttttaaagagaaatataagataacttttataagtattataagtacttactactttaaataagtactctttagctaaaagaaagaaaataaagctatactagctatttttataatctttaataaagaaaaggaagtaaaactagcctcttcctttaataataatactaaatctagtttaaagaaattaaataaaagagaggacctaatatatatatatagataaagatacttttttatagtatactcctatttaataaaggcgtctagacttaatagctagaaactagatctagaagttaataaaaagatactagagaatattaagaagctcctatagaggctttaaaataaagtaaaagagctttaggataagcttactttagaagagaaggagattttaaattagtcttacttcgtactaatcgataaagataaagatagtagttttttaataatactatctttactacctattaatatatccttctttataaatagtatataaagctctattagagatagatagctagttaattctataactagtaagtatatctctaataataagagtctttttattaagtttaaagagatagaggggactctaaaagtaggtaatactactatatagctttatagaactagtaaagtccgacttaggactatcggacgctccggaaagcctattaatcttactcttttagatatagagtattcccttagtttttattataatctaatttcggttatactaataaagaagtatagatataaagctaatttcgataaacttactattattaataaaaatattagtaaaacgttctataagctaaaagagattaagaacttttttatacttttataagtaggttttatatttctaatagtatttataactactacttttaatataataaaatatataatatagccccttacttttaaggcttccgctatttattagtactagcgcctcggctatctatatagcgagcgtattaaaaagcttataattatagttaataggatagagattattaaagatttctctctaactatagatactaaaccttataatcctaacctttataaaacctactagctaaatagatagtagtagtaaatcttatatagagtataaaggaccccttttagaccgtttagttatatttattttaatctaattatatttaaactagggtataataattatatctagctttcttatttctatctagataggattcgctatcactagggagagatatataagcggaaaagcggctattagtaagctatttatactttcctctctctactttattactagtttaaccttctaatttatatcttctatttagataataaagatttaatagatagtaagactatcacttttcttaaaaagaacggaattataatatagataatagttattagcactctagagtaaaacggctttataaagcgatctaaaggggtaattattactaaaacgagagcgctttttaaagatttagcttttctaaagaacctctagctagaaatagtatagactactatatatatattaaatagatcgctaataaagctaaatttagggaaatagattattttatgatagacgagagaagtgtactatatgacttaatactactactatataatagggtaagaaaagtaaagcgagtgtgttttataaagagtagatatacttagctatttagcctatattaggcttataaagtagcgctaatagcttagtaagtgatacctaaggctagtaagtgatacctaaggtagctactatatagagaaaataaaggactaaataaacgtataggaaaggagtaattccggccgatatacccccctagaagccacctataggctctatagaagttaatatctttatataatctactcttctactaaaggcttaatattaataagtccgagagatattataaaagccttataagactataatagaagtagcttagtaagtctatctatctatatatcggtagttataacctagcgaatagaaatcgagctagtactaatttcctagcgaagctagtagttataaatatctatatagcggagttttatatatatctaaggttactcgcgagttagtaagttaactatctacttattattatagtcgatagtaagacctactttataattaagtccgactatattaagaagcctcttctactatattactattttactagcttctaaaatagtaagtagctccgcctctattattaaggtagtgactatcttctatttactagctttctagttaatagtagcgctaaagagcttataaaggaagccctccgagctcttttaattaatataattactaaaggaagcgttacttaagaattagagtgtaggattattataagtaggataaaactcgagagcttgatattaggtattatatagatactaaattagccgatttatagcgttttagtgctctagtcctagatttattaggaacttagcgagatagttagccgctttcgctatatctaggcgagtaataactattagatagagagctaagcctagcttctattaatacttatagatctactctctagttataacgctagtaaacttatttatccgattcgctagaagcggtattaaatacttacgattatatataagtccgtatttagtagctatagaagagatataagaatcctagtaaagctagagcttatatttctagatatctcggagaatacgtattctaagaaactataaagcttctcctatttcttaaagcttctagtgcttctctagttcttattatagctagagtgcttcttagagcctcggccggtagtatataataatattattattaatatagaagaagataataatcctatctctaataaagagatataggtcttctaggatatatttaaatcctagcttcttaaggatataagtagcttcttactactataagtagggtgactttcttagtctatatagagctttaaaaagcttctataccttacctctattatagaatctttctagtatttacgtatatataactttatcgagatcgctatttagaaaggtattaatagcgttaagttatatcgtatcgagattaaatatagtaataagtataaagatagcgtaggtaatatatatagtaagtatagctatatatacttttcctccgaattaattatctagaggtctctatagatatagattcttacttttaactttactaaaaagccgttactatcgaatttataggtaaatacctaggttaggggaagtatctagatactcctatcttataggggaggatatactttatatatcctataaagcttaattaattcgaccttaagtcctactatagtaaggaagccttctataaaagggtgatttactacttctttctagttctatagctctagtagtagattatcttagtattaataggctactagttaagtagtagaaagactaattataaatatagcgagtacgccctctatattattagagttaacgtaatccactagcgagctggccacactagcgagctggccactttatccaacatactaatttcaaatccatttatctcaaccaaaacgccattaaattaaatttttaaaaaaacatcatctatctggacatgtctctctcctatgtcctggcttcctgcatactccgcacccccgggggggttttgtacgcggttgtaaacctgattcaccatgctgaccgggaccgggttcagctacttccaccggctgtataatcagcgcagatgcttcctgcacggagagaccgctctctgcgtatagatgcttcccagatctagcacgcttttgcttcttcttctcggtttcactacgtaaatcactcacttctctctccagaagtgcagcggattgcatcgtcatttgacaagcttttaaaacctgatttatagcggacttcagcggacttgggggacttcctgatctcgtacgaagcaatgctttgatagaggaagcttgcttttccaattgcctgcagtttgaaggtgtttttggatcccaatcactaccccggctaggggggggggttagtgtagcaagccgaatatcaagcttcgaaatcactctctctggcgcgaaagggactaaaccggcagattggaagctgtttttaacaatctctggtttaaaagcttccattcgtgcggtaggataggaatccaagaagtccaatttatccacatgattggatccgcaccgcatccggaattcaaccagtctcccataggctcgttttaacaccgcaaaacagcctatatctagaggttgtaaaagatgggatgaatgcgggggcatacagattggtataacccggtttttttcacaaatttcatcaaacctcggtgttaaatggcttccatggccatctagtattaaaagccgatatacccccttcatccgtacaaaagtggtcggaataaagagcttttcaagccagcgaagtccaatttcgtcagtagtccagccattaggactaacttcgaaacgccagtcggaaggaagaccatcgaaccaagattcaataaagactttgcctttaaaaatcagacacggtggaagggcccaaccagccgcattcgtacactcgatagccgtcacctattcacgatttccaggttgtaaaagtgctcgccgaccgtagtattcgcttctcgtaataaccttcgcagtcgctgtcaatcccatagcaaaacccgtctcatcaaagttataaacgtcgtccgggtggatcccaaattgtaggatggttttttgaacaagatcaaaccagtcctttatgacttttggatcctcacatttcgcacgctcgtagttataccgtttcgaaaaccgggaggataggagaggatgccttttcacatacttcgtcacccaattttcgccgaccgaaagaaccggggtagtgccacgcttttcaaggagaagattcgccatttctcgtaccatagacggccggggagctgatccccgggaatctatagagagaatccatttttaaagagattcttcttcaatttctgttagtttacacgaatttgcgcgacaattcgcgcggtgttgtattccggtaagacgtgaagaaagggttgaacgggggattttgaaacggcgcgcagtttcacgaattgaagagatttctttatttttaaaagctttgatagctaataagatcctaccctcttgctcagttgattctttggaggattgggagcgaattggtggcatggtagatagtttaattgactaagtgctaattcatggacgcgttttttgtagggtggccagctcgctagtgtggccagctcgctagtggattacgttattatatactcatggaaatgctacgatgctaatcaatggagaaagtatcgtatgtattgaaatggacagagagggaaaagaagagactgaaggtgagaggctgtctgggactatctacctgtgaaggcatcacgtgatgtcacgtgatctttctaacatcccccttatagacctgactgcatctctatacaaaacccatctcttacgtgcgatatcaaaaaactccatattgtcatagttgtaattgatgatttagaccatactaagtaggttagtaaaggtcttaaattgctctttgcctagagctttcgtgaatccgttagctgcatttttcttggtatcaactcgcttaatgtcaatatgaccttatgtaactgcgtctttaacgaagaagtatcgaagtgttagctatcgatttgctaactttccgcctttcttagagagaagaagctaggaattgatattatctgtgtagatcttaggacaatagagcggaagttagaatgaatcagcgactttctttagctatatagtatccctatatagttgattaagagcgcaccacttagcaatagtggttgaattcgccgtaattgtctacttcttagtagcctatataacgggtgaactagctagatactataccgaaccctcggtggacttactatcttcccaattagtataggacgtattagtatacgcgtgaaagcggagttcgttagtcctactaagaacgatagtaaggtctaggtgactacgaagatacttaataatatatagtattgctttatagttagaaaacgtcggttttgctagtctatattaaagacgggttatagtgaaacggatattaggtctcgtcttaatagctaactagtttagtatactaacaatagactaatattagttaaaagcttcgttatcgagaacgtttatagcgttagctagtgtctctctctatatagctagtaggggtgtctctttctatctagagatattagtagtgcgaagaaccttctatatatatactatctaggatattataatagtcctattagtatagtctctatataaagcgtagtttaaatactacttcggttcactaaggtcttttatattatagaactagcggagcgtatcgacaacttactatatatctttatcctatagcgcggtaataataaagtcgtctatatagattattataatagtcaaatttatacctttgccttttatatagatatagggatcgtctttaagcggatagaaactaatctagcgtagcttactatctatctctttattctaaaggtaagtagagtcccttagtccgaaaagcgcctagttaaacgtatatacctattagttcttatcactagaagtattagtatactcgaagccggtaggctatcttatatagatagtctctacgtcttcttataaagtatttagatatactatagtgaaatccacttatctctatttaagactatagatagcgataagagtaaacactatcttgattatatattccgctataataggggcgtacgtttctctactatccttctcctagaagttgccgtaaataacctatcaagccttaaagccgtacacttcgttatatatattagtttttatagtaaatctctactgtctaggcagaattttagcttttagcggcttaagaatcagactctatatcccctttactactagattattaagttacttttatatagcatcctcctattaagtctaaaaaggacttttctaggcttacttataggtggatagtaaattaacgtcttttatatataatagctttctattatagagaaatagcttattaatattaatcttttctactaatatagctattatagcacttctaggtcctatagacccctttctaccaccctctatcaagttattaccgcctaagtccttcgcttttgctctcgtagtagctcgctatatatctcggtctcgcttcttatactcgacggtaagtagcttctactttaggttatagtatcgctcggggggaattccgatattcgcttatctcgatcggcggggaggcgggggaaccggggtagtaggatcttatataattagattaggcgaggatttaattaagataatctcacgacttagtgatatctctaatctcgctataataggtgtgtttttattactagaaggtatatcctatatcgttatctctatagcctatataatcttataacgcggtgacacactagcttgctatatagagacagactactaaggagcttactacggagaagagaaagggtattaataatccgctctctatctctccgaggaaggtgtagttctatctaacgtagctatcttagagctttacctagtaatagcatttctcttaatattattagcttctttacgaacttcctttatacttttagctagctaagaaacctacgctataaatacgcgaagtctctctccgaaattagtccttctctaataaattagggtagcttactataaagcttcctactaaaccgtttgctctagtgccttagtaaagtctagtcttactctagatataataggctctttataaataataggtaaacgggtttaaaaaagcttgcgttaacatatagggggtgcggcgatagccttttactactatattttctcacgcggtgtctctagtatagtagagacacttccgtaaatagtaggaagataaattgtagatagtgtgataggcgtctatataaacctctactaagctagcgtctatattagctatacaggctatacgcgtataacctactactactatttaggcgtagagtcttcctcgtcgtttataagcgaaattagtataaagccgatagcgttatcactattatccgttagcccttttaggttaggatagggttaaactagtattagtcctatattatctttatctcctagctatagaaagccgatattataagaagtcgttactttctttgtggtagggtcctatactttataaatatgacctctatcccccttatatcctactagcttttctttctacgctctaggagccgctttccttacctatacgcgcttcgccttcggaatatatatgtaagcggtggacccctagggtcggagatacttaagagagggtttaaggttcttaatttctagctctttacgctagtgcgtgagcggagagaccttagtctttagattaactagtctattatagatataaatagtagtttctgttacgtatagctatatatcctctaatataccggcattaataattatagtcctctatatatcattgatatatccgccgaaacgctctatagtgccgtttagctctatagtgtacggaggtgtgatttcgaaagttattcccttcgcttcaccctatttaataaactctttaaatttagtaccgctatctatcctctagatcctagggtatctactagtaagtagcttaatcttcttatagaaggtagttagcttataaaaagtatcgctcttattctttagtataatcccctcgattagataggtagtatcgttaacaactagtagctagtagttctccctatttagtctagtaggtttaattagctaggtgttaacgtggaatttctatactacgtcttacactctagcctagggttcacgagatatcttttatttcgatttactacaaaaataggcgttatagtcaaaatactctatactatactacttattatcacctagctactctatatactatagtgtagaagcaatacgagcttttccggtataactaagatatcggtatactttataagctatcaccttatttatagtgttaatatcttccttatccgagttagagtcagataggacttcgtttagatctttatctttaggactaataaggtataggacgctagaagtcgtatctacgtaacctacaatgtctcccttaccgtcggtgagatatctagtgcgtatattataagaaatgtcttattcttcgagaagcttctatatactaaagagcttcctatatcctccgggactatagtatccggttattataaaggagtgagtcttactatttagtaaagctacgtatataataatctctctataacctagtgtaaccactctcttaccggagtagtctttatacacgtaagcgaggttaggataatctatctagtaagtgtggaaatcttctagatcatatataagagtcttactagaactagtgttaagtaactagtcattagtcctatccaccgagcttaccgcggtaataactatattactttatccttccgactagcgttaagctctctagattacctttaaataggcctagagatttccggatagctcctataaagataggggggtctcgctaagataagcgtatctctttatagtatatagtccgaatccgtagaaagagtatatattactatcgtccttctaggtagtactattacgtatctcgcgggcgtagttataaatatctttatcgttagtaggttgcttccgaagacctttcttcttcttctttatactatcaatagcattagggtctttagctatctaggtgttatcgttaccggtattataaccactctagccacctcggtttcctccacgactacctcggctaccactatagccactatagctagtattagaagctacatttaaaacgccttctataactactactacctatagtgccttctagtattcttccaccttctcgagcgttatcttcttcggttccactttgctagcttcctctataataaagtgaaccttcttaacttctaattcgaggttagtaagaacctaagacaaagcgtgtatagggtaaggagctaccttaaatctagtaagtatataatactacttctaatactccttaatatactcgcttaccgagctataatccgatctctttatcttatcaaatttgcgtatctctagaaatactatctaaagtatatcactcccttaagttattgttataagcttattatatatcttatccgtatacttcggtgtttttaataggttacggatcttactttatagaatagtatcgatttagccgtatatctagcttaccactaagcgggactaatacttctatctcttatatacggggttcgatttatctagtctaggaatatcgctatcgagtagccactctagcgtataggggattagctaataaacaatagcctatctctatatacgggggttagcgtcgttatactcgagcgcctttaccttctatagttttattatagcaattttagggagtctatatccctaataagagggtttcttatcttcgttatcgctattatcgttataagtgaagcgaatcgggttattaacggacggaatcgatatacggggtacggggatacgaggaatggggataggatttaaagggttagctatcacatcgaggggataagggttagtgtcccccttattaccgctatcgatgttagctatattatcaaatcaccaagtaaaagcttaacggagcctttaaatccggcgtgcaattgcaaagcttaatagagctttatccggcggggtcgaaggtttcctagatctgattagtcgaatggtcgggacgtgcagagttttctccgcacaaaagtggatcaaactgcgggacgggccgagatcgacgatagggttcaggtaaaagcgctttaaaagaacgagttgtcagtggtccagctaacaagtaaggtgctcataacctcatggaaatgctacgatgctaatcaatggagaaagtatcgtatgtattgaaatggacagagagggaaaagaagagactgaaggtgagaggctgtctgggactatctacctgtgaaggcatcacgtgatgtcacgtgatccttccaacatatactatataagtagctatattagggtcttctctaactttctatctcctcttatcttatataatattagaaggggtgacttctccctagttcttatccttattagctagtatctttagatgaccgcctaggacttcttattaaggtaaattatacctctttactctctctattagtctagtctcttcctataagaatattagtagtcgcgtctaaattagacgctcttcgaaccttagtggttttattagaattactacttaaaaaggttattatcttattaaaggagtagtaggagtaaactatctcgctactaatagagtgcttattatagagctattataaagatagatagctagcggactttctagaggagaatctagactatctagtaaagagatagtccttaaagaaggaggactctctaggagagggatagcgcttagtattagcgaaggtatagctagaaagcgctcctctcctcctatatatagtaggctttcggcctatatatcttattaaataagctcctcgcttatccctttaactaagctattagttaggtcttactctctctaagtaatcggtttaggctcgttttatataattagtatagcgcctacttagcgtatagcctttttaagctctttattaagcttatcttctttaataaccttagtaatctatctttaccggatccttagaggctctattagatactttttataattaagacttttattaaaagttatattctaaacgaacttatagctattagtataggggaactagaccttctaaatattactcgctctataactaactagatatctaatttctactctatagtatattttatctaattaagagatcccctagatccttatataggctcggtagctatatacttttagatttaaaaggttaataggagtaaaggtatctatcctttataagtagaattcctattagaggataatccacttccctaagtttagctttatcggcgatctatttaatatatatatagtagcttatactacttctagctagaggttctttagaagagctaaatcttgaagaagcgctctcgctttagtaacgattacccccctagatcgctctataaagctattttactctagggtaccgataactatcgtctatattataattccgttctctttaagaaaagtgatagtcttactatctattaaacctttattatctaaatagaagatataaattagaaggttaaactagtgataaagtagggagaggaaagtatagatagcttattagtagccgcttttctatttatatatctctccctagtgatagcgaatcctatctagatagaaataagaaagctagatataattattatactttagtttaaatataattagattaaaataaatataaccgagcggtccgaaaagagtcctttatactttatataagatttactactactatctacttagctagtaggttttatagagattaggattataaggttcggtatctatagttagggaggaatccttaataatctctatcctatcgactatagtcgctaatttttctatacgctcgctataaagataactaaggcgttagtgctaataagtagcggaagccttagaagtaaggggctatatcgtacgtcttattatattaaaaatagtggttataaatactactagaaatataaaacctacttatagaagtgcgaagaagttcctaatctcttctagcttatagaacgtcttaccgatatttttattgataatagtaagtttatcgaaattagctttatatctatacttctttattagtataaccgaaattagattataataaaaactaagggaagactctatatctaaaagagtaagattaataggctttccggagcgtccgatagtcctaagtcggactttactagttctataaagctatatagtagtattacctacttttagagtcccctctatctctttaaactcgataagaagactcttattattagagatatacttactagttataaaattaactagctatctatctctatagagctttatatactatttataaggaaagatatattagtaggtagtaaagatagtattattaagaaactactatctttatctttatcgattagtataaagtaagactaatttaaagtctctttcttttctaaagtaagcttatcctaaagctcctttactttatcttaaagcctctataagagcttcttaatattctccggtatcttcttattaacttccggatttagtttctaactattagacttagatacctttattaaataggggtatactataaaaaagtgtctttatctatatatatatattaggtcccctctcttatttaacttccccgaactagattcggtattattattagacgaagaggctagttttacttcctcttctctattaagggttataaaagtagttagtatagctttacttcctttctttcggctaaagagtgctcgcttagagtagtaagtacttataatacttataaaggtcgttttatacttctcttcgaaaatcttagtctactagtagtagtagaattagggttctaatagtataaaagcttaaagaaagtcgtaaatagtattattattatctttaataaacttaacctctacctttttatacttttagtaaaggttcttaacttttaaaagctagttattaactatagagtctttaataggtataagaagaagcttatactatgacctataaagaagctagatctatactatatcggagaacgagaagcgtttttatagtatttaaagtagctccttcgtattatcgatattaaccgttagatactaaaggttaatagctagtatattcctaatctagtcggctaccttttttaaagatagtcgaataatcctatattcggtaaggtctaccttataatccttccgattatattaattatccgttcttccttttataataaggcgctttatctctagattcttcttatactatttactactttagtctagtcggactagctttactagtatttttagccgtttctcgtctttaagcgctaggtcgatatattcctaaacgttagacttcctagctattaactctatctatataatctaggtccgctattatactaagcttttaaggataacttatacccttagggtgcttcctacgtcggtaggaatacttaaagaagtaaagttatcgtagaggagtgatatctcagcgctatatagtattattttcttcgttatttatcttcggaggttagtagaagtaaggtatagcgttaaccttcttcgtgcttaggggtatagtgctttctaataagcgactatattattataaatcgataagggtgtcttaaagagttattagctaactaggcttataactaataaacgagagaagtgtactatataacttaatactactactatataatagggtaagaaaagtaaagcgagtgtgttttataaagagcagatatacttagctatttaacctatattaggcttataaagtagcgctaatggcttagtaagtgatacctaaggtggctgctatatagagaaaataaaggactaaatgaacgtacgggaagggagtaattccggccgacattttataataggcattctacttataagggatagatatctttactcctattaatcttttaaattttagggtatatagctactaagcttatataaggatctaaaggatcctttaattagataaaatatactatagagtagaaattagatatctagttagttataaagcgagtaatatttagaaggtctagttcccctatactaatagctataaattcgtttaggatataacttttaataaaagtcttaattataaaaagtatctaatagagcctttaaagatccgataaagatagattactaaggttatcgaagaagataagcttaataaagagctcgaaaaggctatatactaaataggcgttatactaattatataaaataagcctaaactagttatttaaagagagtaagacttaaccgatagcctagttaaaaggataagtgaggagcttatttaataagatatataggccgaaagcctactatatataggaggagaggagcttatataataataggtagaaaaatatcctacttttaagttatagaagcgcttcttagttatactttcgctaatactaagcgctatccctcttttagagagttctttttctttaaagactatccttttattagatagtccggattctcctttagaaagtcactagctatctatctttataatagctctataataagtactctattaatagcgagatagtttactcctattatactaaaataataacctttttaagtagtaattctaataaaactactaaagtttaaagagcgtctaatttagatataactattagtattcctataagaaaaaactagactaatagagagagtagagagatataatttattttaataaaaagtcctagatagttttttaaagacactagctagtaaggataagaactaaggagaagttaccccttctaatattatataaagtaagaggagatagaaagttagagacgactttaatatagctacttatatagtatataataactctaataatatagagggcgtactcgctacatttataactagtctttctactatctaattaatagcctattaatactaaaataatctattactagagctatagaactaaaaggaagtagtaaaccacccttttataaaaggcttccttactatagtaggatttaaagtcgaattaattaagctttataggatatataaagtatatcctcccttataagataggagtatctaggtacttcccctaacctagatatttacctataaattcgatagtaatagctttttagtaaaattaaaagtaagaatctatatctataaagacctctagataattaatttaaaggaaaagtgtatagcgatacttattatatatactatttacgctatttttatacttattactatatttaaccttaataaaatataatttaacgctattaatacttttttaaatagcgatcccgataaagttatatatatataaatactagaaaggttttataatagaggtaagatatagaagctttttaaagctctatatagactaagaaagtcaccctacttatagtagtaagaagctacttatatccttaaaaagctaggatttaaatatatcctagaagacctatatctctttattagagataggattattatcttcttctatattaataataatattattatatactaccggccgaggctctaagaagcactctagctataataagaactagagaagcactagaagctttaagaaataggagaagctttatagtttcttagaatatatattctctaaaatatctaaaaatataagttttagctttactaggattcttatatctcttctatagctactaaatatagacttatatatagttataagtatttaataccgcttctaacgaatcggataaataagtttattagtattataactaaagagtagatctataagtattaatagaagctaggcttagctctctatttaatagttattacttatctagatatagcgaaagtagctaactatctcactaagttcctaataaatctagaactaaagtactaagatactataaattagctaatttagtatctatataatatctaatattaagctttaagttttatcctatctataataaccctatactctaattcttaaataacgcttcttttagtaattatattaatcgaaaaaacttagagggctttttttataagctctttagcgctactannnnnnnnnnnnnnnnnnnnnnnnnnnnnnnnnnnnnnnnnnnnnnnnnnnnnnnnnnnnnnnnnnnnnnnnnnnnnnnnnnnnnnnnnnnnnnnnnnnnattagtatatagcttatatcgtctatatattttatattactatactatatattaaatgtatacttagtataagtctaggtctagtcttctatatataaagataaaggagtggttaagataaaactagcctttctctaaaagcactctaaggataataacgtattattatagtatcgatcgtttaggtatataggtatctaatattataaagatatatatctagaaataattataccctcttagcggtttaatcgggtagacctattaattttccgctatttttagatataaagtatagagcctatatatagtaatatttcgagtgatctttataactatatataaataagtataagctatctatatatatctctttctatatatatatatctctctttatactaataagtatctaggttctactttacttttagatagacctagttattatctaagctatataaatacgctaatagctagtttatatatataggctaacggcctatagtcttcgagcgagactctattcgttattataaggcttatatatatttactatatactaacactatatttagctaacctttatcggttatccgaatatatataacgaatagcgttagtataagtccgcttatattttataaagctctataaaaattaatataccctatcttaagcttttatactaacgtaatagtactttagaataggggtatagtagtataaactactactttatagtatactatatagtaaagcggaaattctatagtatattatatattctatatatattcgatatatactaaatatatattagacttaatacactcgaaaggagtagattaacttagactataggactataatataaagttcgacctctatatcccctataactagtatcggtttccgttttatatacttatcgcctaaggattacacttatataccccgccgctatctataaagctactatattaatttagctaggaggttataaaggctattagcttatataatatccttaccttaaccgcttataagctaatagtatcgccgaagtttttatatattagacgtaaatataataatactacggtttagtatatctatattagcttatatattaaggatcgggttgactactttaatttataagtaaaaactactttactaccctctagggacgagtattactagcgtatagcgggagttttagtttaatttaataaaggactctaactaataatagatccgtaaggtacacttctttaataaagactactagtattacctaattatatattatatatataaataggctaagcttatctaaggtatatagtatattaagatagatcttacttttaagataatctaaagtaaaactaacgtctttataatattagggtagaattagtaggtaggctataagacttcttcctcccatttatttaaagcttttactaatttatttatagagataaatatatatctctatatatttataaatctagagacccgcgaggcctatagggtcctccttaaaaaggccttctaaatctctagtaatataggttataagcctattagataggcttattagctaggtaacgataatttatataaaggtatccgtactattatagtcgatatatataaaaagtaggctctaagtatactaaatatatattaaatatatattagatttatactaatactactaggctttagtgattactttattagattagatctatattagatatagttagaatatttttattatatattaatcctctataaaatatatatttagcgtatatttaaaaagaatttctataattataaagctagtatagtaatccctataatctttaacgctagttcgaaagctaaagttctagcgattatatataagacttctaagaaatagtctaaaaccgcgaattagtttaaagataaaaggaaagactagattttagctagtattatatctaaagcgttaaagattcctattacctagtagaagcttacgctatactatatagggattagtaagagtagctattaccgcgataataaggtagttagctagaagtaggcgctacttactataattattcggtatatatattttatatattaagtatatattctactaatattaaactatagatataaagcttatatctataagataataataaagaatcggtttatagagtaggagggtattcgatatttgtagcgttctttagactaaatttatcgtatttagaaatagattaaaaagaaaggtaatatatattttatatatatatttaatatatactaagtctatattaaacctatagataaacggtaataagcttatacctaccgctatattaataaatctaagctactatagagcgcgactaatatatataaccgcttagagctagtaatatagcctttaaatatacctttagagctatatttagtatttagtacgagtgtaataactataggatcctatactagatattagtctaatatatctagaggatccttatagcttaggctatctaatagtgcttcttaggctagcttaggagaggatcgtatagataaggataaagctagaccatatatatttattatatatcttaagaagaagaaacggataaagtagttagctaaataggcgagattacttacttaagaggttaataggagctcggagatagatagatatttttaatataaattaagtatatttttaacgtaaattaagtatatattaaatatatttaaagtatatcttataaaagagtatttctataagttatacgtataatactagaatcacttttaaaaactaatttatccctatcttctatcctctattacctatccctactccttattattatcttccgcttccttttcttcctattcctctttttcttactcctatttacctaagttattatcctattagaatatatatttaatatatatattactatcgtcgttagttaccgttacctataccttaagtattaggaggagtagctctaaaaccggggaaggggatcgggttagtagggatagcgggggtaacctacttcttattagtatatatttagcgtatcttactagagcacttatatagcggctacaataagtagagctaggggtagtcgggctttagtagcgatagaaacggtctctatagttagctaagaaggtagtgtccttataactagaatatatagttagcctatattatatatatactaagcgtatccttacgtaaatctctctagggtattatagtagtagccgataatactattagtaggcccccggctaggcttattaaagaataaggtattacactaactataggtaagcgtatagcgcttaagcgtattctctataaaaatacgctctatctaggagatcgaagtatagttaggattaactactaaaacgattagtatatattttatatatagttagtaggtgcttataagcactagagtatatattatagatatagcgataaagagtaggactatcgctaaagagtatactatatatttattacctattaatagtaatctagcatctattattattagtatataacttatacccctctattaaccttacttattatatatagtactactagaggcccgttaatacctataatattagttactttaatattatagcggcgtaccccgctagtaattatagtagtatatatagcgggcttttagctagggtttagatcgataatagggtctagatatacttagtatatacttaaggtattatatatatatacttactatatataaaaccgaagatagggtaagggttagccgctctaaagacctaggggtttataaagtcggcgatctaaaggcctaagcctagataaacactaagatttactatattaaaggtctaaagaaggtaaagatatataaaagatatattaaacttatatttataagaagatataaataaatagtagagggtaaagatatatataggaagctagggacgtataggaatttatatataaataaataaatagagataaggttatttttagatatataataaagcatttatataggagtacgctaccactagacttagagatatttttatatataaaggtgcttttaagattatattttaggtacgctttatatagatatatatattagagttctatatagaatatagtactataaatatatcgattttaatcgttttcttttattttaaattaaaattaataaaatatatacctcctttatactatcttctttataaattataggataaaggctataagaatagtagtaatacgtcttattatacttaaaagagatataaaatatagatcctaatctaggggtttaattttaattatccgaccggaaaaacgtgatagggactagaaattatataatcactttttctagtccccgtcagctggaacccggtctgatctttacccgcccccgccccttttcatctgattatgaagctcctcgtaaatcacgtgatctggatagggcttgtttgctagggtttgccgagtccccccataaacattctgatttcctataagtaaaagctgcactttcacctgcatttttacctgcacttttacacccccctttccatcacttttacacccccttttttatcaatcttcatcaattttcatccattttcatccatttttatcacttttacacccattttcacccattttcatcgatttgtcatcgatttatcatcgattttcacaccatttgaacaaatcatatgatctggataggggttgtttgctagtttttgccgagtccccgcataaacattccggtctcctatagtaaaagctgcactttcacctgcactttcacctacgcttttgcaaccctttttcattagtttaaacactatttttattagtttaaaaatgcactttgattttgattttgacttttaatttgtttcaaatataggcaaaaatatagacaaaaatgaagcttttaccagaatgcaaattgatattgatatgtagattttttatttgtgtgcggactcggttaaccctagcaaacaaaccctactagatcacgtgatctatggggagcttcataatcagatgaaaaggggagggggcgcggggaaagatcagaccgaccgcagatatactctgtggctggagatgttcggcggctgtgttttttacagaggcaataccatagaaaatagcacttgtattgaaaactaactgccaagagttactatcccgaaagggtactagtagcatgacattagttaaacctggcatgacaatagtgtttcccaagagtagagagaactaaacctaataatactatagaagtactctatatcgagcgagataaggctatcgcctatagagatatcgctatctataaatatagtaaacttaccttttatctcctaaatctctaagatgagaattagtatagtattagcgtactaattatagaggccgctaccgcttagaagtcgactaaaatacctaatatatctatactaaacgatagaaaggaagtctaatttaagacttaggaaactataattcgctagaaacttaaaataaatattaactattaccctttatctatttactataagctctatatctagagttattataaaggtaaagcttagctatatattactttttagataagctctaatactagtatcctatatatagacgctaaagatattatcctttatctaaagactatcttcgcgaacctaaaccggtatatagaagcttatactatatattataagcttaagataaaaccgaaagatagttttattaatttctttatagagtttatatagctcgctaaagaagctattcttattaccgaaaactataagtgtaatctatatttaaaactcctatacctactttagagttaagttacataggtagttaactaagatactatcttatttaatatatatatatagagctattaaagtatagcgtataaaattagtctttagtagaaagtaaagaccttatatatctaatctataatccctactattaatactagagatatatccgctataaattagttaaataccttttatataaagcgtaagtatactctaaatctattagcctttataaaagagactttaataaaagaaggataatattttaactataagaaatatagatatataacctataattatctaaagaagaaaccgacccttactattataataactactcctactataaaccctccctatatagacgagattataaagcttaaagcgaatactaatttaggaaaagttcttatctaagcgaagtctcccttttaaataaatagaaagtattactatttttactagatttctagaagttaattagcggttttaaagatagcttagtttttaatatatagctaatatataatagacgcttattttctattttagtatttagtaatactaaagtagatagttatatttttattaattcgttaatagttataatattagataagcgttttagacttaagattaaaagactagactataaatatctaatataagattttaatagtaaactagtagaactaatatagtatatagctttttttataatttatattaatagaagaatttaataatagatctctatattaattatagatttaggaaaatataatattatctttagatagatatagtttactaagtataatatcctttttaactatcgataatactagataatttagctagataaaagggctcttttcgataaagtagcgagtaagatctctatcctaactctaaagactatcctatagagatctctataagataatatttactaaaaagatatagaccgaaaggnnnnnnnnnnnnnnnnnnnnnnnnnnnnnnnnnnnnnnnnnnnnnnnnnnnnnnnnnnnnnnnnnnnnnnnnnnnnnnnnnnnnnnnnnnnnnnnnnnnncgatagataggaagtatagaaaaaaagagaccctatagaaagaattaagatctttactactttactttataagatagaccgaattcttactataaagtcgtctattaaaaaggatcctaaactttaaaagattaaaaggatattactattagagtattataacctagctaaagtatttttaaagaagaagtcggataaattacccttatatagacctagtatagattataatattattcttaaagctaaaatataactaggttactatcccttttataagctatcttttaataagctaaaagcgataaaatagtatattattaagaatctagataagggctttattatactaaatatatccctttatatatctctaatcttaatagtaaagaagcctaatagtagactttaattttatatagacttccgaaagttaaatataattactaaaaaagactattacctactctctctaatcgataaaatactttaataaactagtaaagcgaagtactttactaaacttaatattagataaggtttttatcggattcgtttaaccctaaaagcggaggacttaataatctttaggatataatatagatcctttaagtataaggtaatactatttagattaataaatagaccggctatattttagcggtttataaataatatcttataagaatatatagataaatatatagttacctttatagataatatccttatttatagtaagacttttaaataatattatagataggtaagagaaatactctcctaactatagaaggctagtttataagttactcttttaaagtataaatttactattataaagactaagttctttagatttattataagtataaatagtatcgcggttaatcctaagaagatctagataatctagttataaaagaccctatcgatagtaaaaagcgtataatccttttttagattctataacttctatcgacgatttatctagagatatagtttaattttaaagcttttatatcgcctaatctaatagaatatcttatataaatagtctatttattataaaataatctttatactcttaaaaaagaagctagttactatattaatactctattattataacctaatataaaaaataagagtagaaactaatactttagatagtatattaggagtagtattatcttaatactataaagataataatttttagtatttagtagctttctatttaaaaaatataagctatagagttaaactataaagtataggataaagaactctttactattatctatatattataaaaatagaggctagagcttaaaagtctaatataataagattattttaagattcttatagattattaatctctagaatactttataactatctaataaataaactaataataagcgagataaagcgagttccttttataattctatttcttaattaaatactaactaagaaaaaaaaatatactagcggatatattatcgagaaaggagttattttatattaataatagtagatagttaacacttttactagaggactatttagagaaaggtatttatctactagatctaaacctaatctaactaaaggatatataagaagttattaataaggtaaaataggtaaactataagagtttagagcttaataaattctattaaattatagtagagggaagtaatctaaaatagactctttaaaatagactccttctttataaagaacgtttagaagttcctaataaagataatctatatactaaattactcgataagatatactaataattaataattttatattttagtataaaaaagctaaagaagcttatttctataagatactattagcctagatagatagcggatattaaataatatataaataactacttagtctataaataaactaaagtatagagagatcgagttcctagactactataccctctctctatcctagaaagactttagtaatatatttctatagatttccgcttattcctaaaggactaatatagatataatactatttttatagtagttaaccgctttagtaaaagactaatttttattctttactataaaaatataaatataaagtagatagcttagttatttattaataatataatataaactattaatatcttagagactattatctctaattataaaagatagttcgtttccgagttctagactaaattctattaaatctttagaattaaaaggaagttattaattatatattatctctaaatcgatagttagagtaagatcgcgaattagtatatagcctagaggttataaccctatattaagtagaattaggataattagttagaaatactatctatagtagattttatagcttctatccttctttaagatattataaaaaaagtccctattctttattaaaaaaggatataaactaactatatcttttaactagaaagattaggaaactataatactaaataagtaggatactatatagatacttttaaatctataagagatctagatttagataaaggaatagattataaaattatagtagttataaatctagtaggtaaattagtattagagagaggaagatttcggtattaacgactatatttttataataataaaagactaatatgagggtagatttagtagtaaaagagtctatagctagagtattagaatctacctttaatactaggaagaaagaaattactagattttttaagctagcgagatatcgaaacaccctttttaaggcttaaaaatgtatttctctagggttctttatatatctagtaagcttaattattataaataagatatctagcctagttaatactattagctagattaaagtgccgatttttatctaatattcctttatctatatctttatagcggtactatcgaaaggggttaaaaccgctctcttatctattagggtagcgatagtattatatttcttaagactaaagcgggtaagaatctaattaatatagttagactaagagagataaattctactactttctctatagtatatattaatagctagatatctttctaggatccctttattagagatattaaaatacctagaaatagtagttttaaaatgcttaattatacctttaaagggagataaaactagtaagttattaatatatactataatataaagactatcttttataaaaattgaatagtctacttatatccggtagaatcctatagagattaggacgttataaagtagctaatactacttatagggactctattttagtctataaatagttttttaaagtaaactaataaactaattagtaggatagttatcttatatacccttaggaaatttaattttaataggttcttttagctttacgtaaaggaatataattataatatctatataatataaaagctagcgcttagctatagtaatagtagtaaaaatcttaaaggatattagtttagctataatagtataaaccttataaaagtctagatcctttacctattagaaaccgcgagctactaagcgagctttatacgtcctattatatttaattttaaagacctagcgaagtgtaagaggtttatagcctttagatttcgactaagaaataactctctaggtcctatttttattatagcgggagagctctttatatatagctactaactatttatctttttccgcgtaaattattacttctttctatctattaggtttaaaactaatatcctacggttttaatttagaaggtatatactatagttctttagaagtgatagtagtagaaagctttattaagatatccggtaagttagtaagaaattataatatattagtattaaagaaagtcctagaagcgagactattaagataggcctagaagggcttctttagtctagttaaacgtcttagttctatagatatattaatatagatagataaagacggtctatatattatatcgctagtgttattaggaatctaatctataaaggaatagtcctactaagaagagatctatatagtatcctaactagtataactagcctcctaactactttatacctctacttttaaactaatactacccgctatctataaataaagctattctagtaataaaagaagcttatctaccacttaaataaataactctattagtaatctcctccggtcgatctatacgctctattagaaccgtattagtaaccttctcctatatagctataaggatctaaggcgacttagtcgttaagagggtctcggtatatctaggatagatagtattaatgcgtagcctatccttagtataatccttagaggtagttcttattaaactaataaccgtatatttagttatagtatatatagtcgataatataatcctagcgacgctttaaatagacgagaaattaataattaagctacgctatagtagcctactattaatcgaggaccggataggctcctactttaatataattttagtagtagcgtatagaataaagaatattcctataagattagcgtttaagatacgttcctaatctaatatttcgtagaatatagctccccctattgttggaggtcacgtgacctcatatgctccctcacactttagctagctcacctgtagatagtttcttctcttcttcacgcatctatctattttccagagcatactaccttttctctgtagtctgtctctattaggttatgagcgcctgttattgaagcctctatcttacaatatgcttcaattccccgtttttacctcacttcttagcgaagttgcgtcacgctaagacactctgtgtgggcccgtagcagagtttttctagatcgaggctccgatctacaccccgcttccgagcaattttcattctgattggaccaatcagaactcactatttcatctgcatctagatttcatctatttatattatttctacattgtttacgaccgttaaaagccgttcgactagaccgtctattattagaccgttcttacgccgaccacctaggccgttcgttaaccttatctcccttttatcgtgaccgtttgatcccgtttaaccgttattacttactatatcgactccctacgatttcgatcgatagaaggaatccgatatcacaaaaattgtgctaaagcttaaaggtgaatctaatttcgctcaatagtagcataggttatatataacccttaggggcaataataagatctatattaagcttatctagggtactatcactaaacccaccctactagaccttagtgataaatcaccggacaccctataagaactagctaaatataatataactatagctactctttaggatctaacaccccacctactcctatttccgaagctcttattagagagcttattcgaaagcaaaagtaagagaataaggagcttataaaggaatactaagtcctcgttaataagtgggattctattaatatttattgctataactagattttcggcactcttaatcctatccctacctcttatatatagaacattaataacccacgagatatatataagcaccttcgtgtggagtatagtacctcgtcttagtaaagaaattttaaacgctttaagatccttattaatttataatataaaaataataatcctatagaattcgtacgtaaattcaaagaagctctctttaaaatctagtaacgaaactccgtcgtgccactagatatagtcctcaatttcttcgttaaggctatttagggcaatctacgatatcacacctttattcagaatttaagaccggatttgaaagatcctaactttatagtggaggtttattataactttataataaggggattgttaaccgcacccccccccccccccccctttggatccncgcacccccctttggatcatggcaccccccctgcctgggaattaaggcgtataccccaccgccttcctaatcaggtgcgacaccagattttgccatataattctgccagtgtagagttttctaccatataattctgccaccaccataggaattccggtttatatagtaaaaaaacatgcattttgatcagaaaaaattgcatattctcattaaattaagtatttgtttacttatatagattaaatacgctacttatgcacttccccgcgcgcgtttccggccccttccccgtccccgtcctctggtcttagtatcactattaacactcttagtgataggtgtagttgtattaactccccgtccccgtcctcatcctcgtctacgtccacgtcctcgtcctcgtcctccttcctatgataatatatactcaaagcctaaggggtctctctacgtagatcgatcctatataaaggggtctgctgaagactaggtgctttgttaggtgctttgctaggtgctttactactaggtgctttgctgctaggtgctttgctactaggtgctctgctatatagtgctttggacgaagttacgggcactagctggccgccctcggcgtcgaacccggtatagatcttagaggaatagtatagggttgattaggggtatatcttcaccctataaatgctattgttagtggaatagtgatggttcgagactctttcctttatcctcgtactacttaataatatgtatataagggaaaccggctatattcttcgaattgtagttatataatatagggataggcggtttagtatctccttctagaagatactaggaatatatctactatataagcgttattcctttagaggaaatccggctaacgagtagcctataaagtatgcttttttaatcttactagtcttaattttataataaattattatataccgctcggtaaccacgcgctaaaagcttagaaggttaataagtaggttattagttaatacctagaggtcctactttaaaagctaatacgctaactcggtataggaagtggtaatcttattaagataaaggtattaagatatatagtaatatagaaaccgcttagggtagttatctaaccactccttttagatatacgtaagaagaggcttaaagataggattattatacttctcctagaagtattactatcgctagtttatctctttaatagttatagcgtatataattcggtactaacgtcgaagtatatactactagccctcttcgattttttaccggatttctttattagtttagcgccgctactaggcgctctactaggaatcctattaggaattacgttaagcttacgcgatttaattagaaaaaagtggacgggccttctttataatattacgattgatatactagagatagactataccctttatatctaagaagatagaggtaattacttttattaaggtatcttctttatctataaggatcgtactagggtatagaaggttaagcgagtcgtaaaccttagcgagatattaaaggattagcttataggagatattatacttatcttttataaatacaaatataatataaaaggtcgatctagttaaagtaaagctaacgatattaagaagggggaggctatacctattagtcttataggtataatctatagaaatcacctagggatttgactttagtatagttaggcctattttatagatataaaataaagctattatatagctcttattattaatatcgtacttaaaaacctaatcgccgtcctatagaagttctattaggagcgcctaaagaggggtacaaccggtaaggaattctatattaagcttctatcggaaattatagagattatagcgtattagggaggtattagagtcactctctcgaacccctattagcacccgggaagccctaataccttatttaagctactactatataatctcacgcttttagactagctcgtttcgatagtggatagggtgggttaatataggggatagactatagttgtaagataaattctctactataatatactaaagttaggtattaagctaaagccgtagggaaatagtaaataggcacttatttctaagtgttatagatctccgttaactagaatcattcggatagcgaatagaatcattcggatagcgaatagaatcattcggatagcgaatagaatcattcggatagtgactagaatcattcggatagtgactagaatcattcggatcgtgcggtaccgcgctataccggttatattagagccgaaaggtcttcttaacccccttcttcgtccgttttaaacgtatagagactagtgtatagctatattatcgggcaaagttgttaagtgtagtgtacctagcctcctcggtctcgaactactagtctagagggggaagtggtaaggtaacggcgagcttagtgcttggtagtgcgggagagggagcctcggtgcttagtagtgcgggagagggagcctcggtgattggtagtgtgggtggggacttaggaacgatctcacggtccgaactagggtcggaatccgacgaatcaaggtatgctaggcctaaagaggctattttggttgctggaataataaaaataggatagaaatgatagaaaagaaaggattaaaactaatgatttagtgcaaatacagatgaaaaaatgagttaggagaaggtaggttaatatatataaaccaaaattgtattattagattatttgctactcgagtcctataatatatatgagactaaagtgacttgtttttactatgtatttacatataaattgtaggtatctgctatcgtctaatagtgttaggggagtttgatatgaaggcggtataaaacctcgaaggcggtgaggaatgcggtaggaaggtgtaggtgtcgaggtaaatgcggtacccgaattaggaaggcggtggggtatacgccttaattcccaggcagggggggggtgccatgatccaaaggggggtgtgaggatccaaaggggggtgtgaggatccaaggggggggtgcggttaacaatcccctataataatagagggttctagtcacattataaactcttcaaattctagtttattaaaccatttagctaatacgatgtctacgaaggacttatccactacctcgaataccaattctaatataaactctaatacttcgtctaagaaagacaaaaagaagaatgataagtctaaatctaataataaagacaagcaatcttctttatataaaaaggagaagaaggatttaatctagtgtaagatacacaatacacttaggaaccattatacccgaaactattatttaaaagctagcggatctgccaatgctatccactagtaaccttaatagtagcaacctatctaatagtagtaatttagtttctaacaaccccaacaaatctctattccacaacctagtcagattataggccaggttaacagctaaggtagggtgatttcgatcctaccttagtagcagagaccgtaagctaatgctatctaccctactccccctccctagtaaggcccttcctcgggagaccccttctttcgttataacaaccttttcactaatacactatttcaaactaacgtccctagggggatttatatccctaggggggtgtatgtcgtgtctaaagaagggttgatagctgattccggtagagacactaccagatagatgattgattccggtaccagcacacacatgacccctcatcggtctgtttttatcaatttcagataatgtgttttgcctatctctacagctataggtgatgtcttttacaccgaaggctatggagatgtcgtcctacaacttttgaactaggattagactgatacccttccctctcttacgttaagaaaggtctggttggctctggattgaaagcatttgtttttactgatttacatctggttttttcattgggagaagagtggtttttaactatgtaggacagatagttatgtgttctgtcgtggggggtgttggaggtcacgtgacctcacatgctccctcacactttagctagctcacctgtagatagtttcttctcttcttcacgcatctatctattttccagagcacactaccttttctctgtagtctgtctctatcacctatatactttattacgatcccggctatattaacgatatagtcgagtcggctaaatattatcgcgacttctcggataacttaattaacgcggtttttatctattatattagttaggtaggttataactcgatatagctttaatctaagtctatattattactcttcgatcttagctttaaccgctactagggctttaggactaatatctagtagggcgattcctaaagcgctatctctagtaaatatctttatataggcgcggctaattcctaaggtagcccctataataagtgtaattctagatacgtctatttaggatattttatagggctctagggtagttcgttagtattagtctcttaatagatatagtaggaatagggatagtaagtaaaaggaatagagtaattagatattaatagcttatatagttttttatagaaaggcttaaataataactaattatagctccgtctctctctccgaagaggagatatacttcctactttagcgtatatagggttattatagagacttacctaacttatatctaacgatagttatataacctatatataatagcgtaccttatacttactttcctatctatatagactatctaatagactaatatatactaccgctagtatatattcctagtacgagggcgttatagttaattattaccttagtcttaagggagtattccttagatagcgaggctatagaaatacttatattatatttatatatacgattgataaaagtgatagtttaaaaatataaaacttaggctatcctactctatagatataaggaagaatattaatatctatattcactataatagtaagtgattattaatatataagtttatagattaacttcttatctagagtattatattagaaattaaaatagctactataataatatagtgctctttattagatcgagctaagttatactccttctattagtataagtcttctcttactaaattcgctagatattagctaatattttagtaaagtaagataaactactatagcgtgccgaattaataaactagttagagaacgatacctaaactaatagatccttagctttataagctataataaacgtaggctagataaagcctactaagctatagactatagtagagtctatatccttataacgtagtagatagtctaacacgcctacgaccttttactatagtaaagaatagtctatattatagattcgatagtaaaagtatatcgctagtatatcctatatagtattaagtatatcttttatattttataatctagtttagaatagatatagtctaggctagatagtagtagcttattaatatagtctttaagagtcttcgcctagccgctaaactcttttaagctaatatagtttaatatattatccccttccgctatatccttttctttccctaattgaataacctaagatagaaagataacctaaggcttagggatactaaatatctctagatagagagtgttagactagaagctaggcctttctagatatagattattctcgccctccttttatgtaaaggataaaggtcctttcaatcatgaaacagggaatgacagaatgtgcgcagcatgtatcgtaatcaatgcgtgcggggttcgccaggtgatcgaccctgcttcttagcgcactgggattttcttttaatcctaaggccccccggggcccccctgatttgggataagagttagtcttatcatatagagacaatacactttcattcctctccccgctattcgtatcttacccggttgataggccttacacctaataactatgtatctttacaattctaactcttcttctttaactgcctaagatacaatggctcccccggttacctatagcggcttacgaaacaacaccgaagcgcccgagtatctaagtcggatcggtagcgaatcactaacgtctaccctaggcgaggaactaagggagacctaaacctaaagaaactcgcccgagccgaacgacgaaccactcgaggaaaaccaccggttcgttaacgagacgatccgaagactcgagctttaggctacggagtacgaagtaaaagcggctttataataacgaatccttatagctaaaaaattggttacggaaaataagaaaaagctctaggaactagtaggactatcgaaacgacctcgaaacgatcgcggttcctctacagagagcgagtaaagctagaagggagagattaagcgggatatcggtaagttcgaagagaactttagtattaagtagagagaagactagttaaacgaccttaatacactctttagaggagccccgaagaagtatatctcgggagcctagaaagtccttgtagccactaacttcctctataccgtatataaaggtaaataggcgatttacgaacgaaagtaccccgaagacgtatcgaactaggaggccttccgagaatagacaaaaatattacttcgaaatttatataatattattaccgatatccttatcctattctaagaggcgacaataaggcctcactaagaccctcggaatttcgaaaactacctcgaatcgctagagaatcacctaccgaaatagaccgaagagtaaaaagcctagacgctttttataaagctatagaaacccctccgagatattataattataaatagtaatagatcacttcctataaaccgagataagatattaaaattagtatctatcctttactatatccacttcgtatattagaaaaagaaagaccacttaccctaacgatacgataagcgtaaacggggaaactattatagttcgataccgaatcacccccgcaccgaaatattaaggggttatagaagaggatagcctcgcggaagaagctaatttaaaggtagagctagaggacggggatccgatagaagattataaaatttgataaaccctaatataaactcctagactactaaaaaaggaaacggtaccgtttcggtaccggaaggtgcctattttatctattaagataagaatcactagataaataagtgcctatagagaggaaccctaatctaagtattaagagtaaatcaaactagatagtagggaaaagtggaggagctagattaattcctaataccctagcttaatacccgctaattaggactatagtacgcctttatataccgattaccttaggagacggtcgcgaaacgtatgcggatctagacactagcgcggaatataatatagttagtaaggaatttactatcaaaaataaattactagctacacctttcttatccctaacgctaaaaggcgtcgccctagatagactccgtacctatagtgtattctaggtactatttataataagagattctcgaggtaccgaaaagatagtgaaacgaccctatatcggtatcgatagggactcgaggctagaaggaagccccgtccttttattaaagacctttattaataaattcgacgttatcctataacctagtgtcgataaatagtggttcggagttaaagggttcgaactttagaaaccttataagtttataaagtaatctaagaacgtagctattatttacgccctaattaagatactagaggaggtatagctacctaacgaagacactaacgtaccggcgaagaattaagaccgaatcctccctaaattagaggagtatcgagacgtattcgactataaaaaagtgggcacactaccgaggataaaagcttccgactatactatcgagctcgaagaaggtaaaactctaccttacggtccgatttacccccttttataaacggagcttaaagaactataggcttatcttgtagataatatcaaaaagggacggattagaccgtcgaaaagtctagcgggagcgctaatcctattcgtcccgaagaaagatagaggactacgtttatatatagattaccggggacttaaccgcgtttcggttaagaatcgctaccctctacctcttatatcagaaatcctcgatcgactttccggggcaaaatactttagtaaggtcgacgttaaagacgcttactaccggattcgactataagaaggtaacgaatagaaaacggtattccgaacccgatatagctatttcgaatatatagttatactattcggactatctaatacgccggccactttctaaagttatatctatataacgctagtagggctagttaacgttatttatatagtatatctagataatatcctagttttcactaaggactacgagtcctattcgatagcgcttcgctagattttcgaaaggctatagaaggtagagctatatataaagccttcgaagtgtatattctactaaaaggaggtcgaattcctagggtttattatagacagttcgggagtgaaaatagactagagccgtatccgcgtaatctaggaatagtaagaactaaagagctactataatatctaagtttttctaggattttacaatttctaccgtcgatttattaaaggattttcctagatttccctacctcttatatctataataaaggggagtaaaaataggaaaaagccgggttaagtaacactaaataagaccgaatcggtagcgtttcggaacctaaaaggggctttctagtcggcgtccctattacgctatttcgacctagagaaatatattagattagaaatagatacgtcgaactaaggaataggaggagtgctttcctaacctaataaagaagggcgttagtatcctatcgctttctagtcccgaaagttcttagggcccgaacttaactatataataccggattaggagctattcgctatcgtttattccttctaatattagagacactatctagatagtagtaagtatcctattaaggtactattagatcatactaatctacgtatatttataacgtagtaaaagcttaacggccgataggcgcgttagtatatatttctcacgcattttaactttattataaagtataggcccggaaagatcaaccctatagacgggctttctaggattcctaactccgagtaagcaatcgtaggagaggaattaacgatcccgatttaaaaccgaatcgtagacgattaacccccggacctaagaaaggccgaggaggaaatagctctaactatctaaaggattttagaagctaaggatctagacgtagattacgagtataatttagataaatataacttagaattctagtttagacttagttaagagactgtatagggagatcctaggtctagtataactaccgagacggtagtaaatcgcgcgagtatagaaatagataactagtctaaatagcgagaactatataacgaattaaatattctattcgacgttatagatactataatagtagtaatctagtctattagtacggacactatagatattctcgaataagtaggaaaactctaatcggataacctagagacgaaccgccgaaaaggtgatatatcgatctcgaaacctagtagcaaaggctagttagtcgacgccttaggattactacggtactaaggacgtctatatataccgggaaaggagggtatccgtataaaattgatataattatattataataaccctactataggccactttagtagagtaagaaccgaagaactcctaaggagagaataccactaggtaaatctataggcggatatatagagatatattaaatcctacgtaatatattaaaccgcctaaacgctaaggtatcgtcctttcggtaagctcgaatctctaccgattctatcccggccctttatcgaactattaatagactttattatagggttaccttaatcgatctagaaaggaaggatagtggatactattctagtaattatagaccgtttctcgaaatagtgcctcttcttcctagtttcgataacgatagatacttcggaattagccgagcttttctatcacgatatcgaactaaggtttagcctactaaatagtatcgtatctaaccggggatccgtttttataagcagattttagtcgaaactatattatatatcctagataaaattaaggtattcgatagcgttttacctctagaccgatagttaaatagagaggataaattagacactcgaacactaccttcggtattttattaacgagtaatagaagatatagcctacactcctacgtatagcggaatttatatataataatagagttaatataataattagaatttcacccttctaggccttattaggctataatcctaatttctaaatacacgccgaggatagtagcgtagagagagaggcaccggtagtagtatcacgaattaagaagctttaagagctccgcgaaaagctgtaggaagtatagcgaaaagccactaagagataggcgaattattataataaacgctactaagagataacatttaaaaagaacgaccttatagctctctcgataaaaaacctataattaaaagaaggtataacgaagaagctatcactaagatagataggaccttttaggatccttaaatatatcggaaagtaagcgtattacctactactctctagctagtatatagcgatttataacgtatttcctatatctttactataactatagtattaacgtaagggtaaacctaagtaattacctttactagagctagtagataacgataaataggaagtcgaggagataaaggataactagcggttcgaagacgaactatactatctagtgaaatagtatagctagcccttagaatataattaataggtacctaagagtgcaatagtgaatatactaaaagttatcgcgagatataaaaggtcctagagaaaataaaattaattagaagtagccgattatataccgtattaatagcgaagcgatatatatataatcttaaatcgaccctatctcaccctatagctaacggagagatataaaagaaattcactaagtaaaataaaagaaatctaggtctaaaacctctccgaaataataccgataaaccaccgctatacctatagatcgagggggaaaccctctaggtataacttaaggaaaggactaaccgcgggccctggcttagaggagccgactaggtcttatatatcttagcggaaggcaacgacgctagtatactaagacctagccgactcctccgcgacgcgtagataggggtaataggaaccctctatagtaagcttagcctagttagaagtaaaatcggtaaaagggtcgctagggaccactaaggaagagcgagaagacacctacctagtatatatatccttagttaactatataaattagtaataataaaacgaccctaaattataagcgaaactcacctaggatagcttaataccggtaagcgaatacgtatagcgatacgatttagtgaagctattaaaggacgcgactaagtgtcgtacacttaccgcgacgccgtcgataaggtcctaaggaaggaggaacttagacgcgccttcctcgctagggctaaaacctcccttagtatttaactaaaattattcggcctaggataaatatataagtaactccactcggtttccttcgatcccctcggggacctaggtaacgttagtctaaaacggttataaaacgggatagtaacgtatataataatataccgttttatagggcttatagagaccgttataatattaacaatttttactattatatatagtagcgaagtatttcactaagaagggctaaagagctataggatctccttcgcgctaatcacgaatagagacgcgtaagcaagtaaggcactaggttcggacccggagaatagggttacgtaacttataaggagaattagggactaaaggtatcgtgataatcttaatacgaaatataaccgaaataataccgttataaagtggatataaaagtgataaggtaatagaaaggaagagaaagaaagataaagagcggaggataaataagtctagttacctacgtaataggataaattatcctaaaaaggaagctacgatcgaggacgtgattaaagtagactcgctcctactatttctattaaataggtaaaaaacttagagacaccgctaaatcggtaccttcctactataaaaactactatataacggttaagtcaagctctatcgggtaatcctctattagaataggtgtatcttaacctatctagaagttaatacggttagtaactatattagtaaaccgccgtttcgctactatctaacttatatacccggggtctttaggataaaggccgataagacgatatcgtcccttagccgctattagcgcttatagatctatacagacggtatccgcccgacgttcggtaataatacgcgtataccttatacgcctagccttataaaggattagtaacgaattataaacgaaacggggtagtaacttacctcctagaccttcttcgaccccgagagactataaaaggaacaatataccctaagagaactatctaaagcggaggctaaattataactagcctccgagatatcgagacgtagttcttcgggctagtctataaagtctataaagaaaaagctcgcctaatctaaaatatatactagatcccttatatctcgtaatatcccgacgggaaactataataaattagtaccgtatcgtagctaaatcataaggtccttactatttcgtaaatagcgtttttgctattataatagttatagaggaccgagattctctcgttaaactcgtagtaagctaggttaaatagtgtatccgtatccgtctcgtacgtgcttagtgtataacggaaacaacctaaatagaagaggtaacgaggccgaatgattttataagcgatattagcaagaggagctatagctatagtgccggatcactaccgatataagagagactcggggcgttaggggagatttatatctagcctagataaagaaaccgttccctttaatagccttaggctcaccgtaggaagagacacctatattagaaagggtttacctagataaaggagagcggtctcctttgatagtctccgtccaactataggtagggacacctacgttagaggaggggaaataattgtaaaggataaaggtcctttcaatcatgaaatagggaatgacaggatatgcgtagcatatatcgtaatcaatgcgtgcggggttcgccaggtgatcgaccctgcttcttagcgcactgggattttcttttaatcctaaggccccccggggcccccctgatttgggacaagagttagtcttgtcacatagagacaatacactttcattcctctccccgccattcgtatcttacccggttgacaggccttacacctgataactgtatatctttacattttacctacgtacttttattatctcttaatctagatccttctaacccgatagacgaaaggatagactattaaggctatagtttcctagcccgctcgttttaatagcggtataaatataataacgctatcttaagttcgctctataaataaagatactcttatagataatacgcttaaatatatagtagtgatatagtaatcgtacttttcgagacttttcatatagaagtccctttaaataaataaacttctctacttctataaaataatattccgattctctttagttccctaagagtatcgtcacctagactatagtaagtaatactgttaatattaacttatatttagctactttagggatattataggcggtcgttagtattatctatatatatcgctaggccttatagttatatataatagccttctcgctctatattcgggatctagagactccgctaaggctaaatacacttatagctaatactctataaaatatatataaattagtatcacttatataatcgcctaggactaaactagcgaggtagctcttagtataaggtataaagagaatatactagggggttttagagtatcggaggggagttattaggctaattatagccgaagtatagtgcttaaagagaaatatagtatcttagggtatagcttttatagtacctatagaagttaaagaggtcggtaatatagaataattataagattaatctagaaagtataatataggtaaatatttataggctactaaatcgttctctatagaatcctaatctattatagcgtctaaatatcctaggggaggcggactaggaacattctcttatctatctaaagtaaagtgtaataaggcttataactaaggcgatagaggtatatctaataaggctaagtaaggatccctaagtaggattatatcttccggcgaactagaatatatctatttatagtcgtttatagctagtttataagatagggtatctcgatcttagtttagtctaaacgccccgaatagcccttagtgtatctcgaccttatctaagatagtcgttcgtttatattctttattgatataggatataatccgaagagttatctttaggggagtacttaagataagctattaacttatccgttctctttcctttactaagaataatagtcgacgaaaccgtaccctaagattacgagataagctctcgaagttaaagaagatatctttcttatatcccctatagtctaggctaagatattaatatattaaatattctagatatccttcgtcgtattttatatattagctttaacactatattctagataagaaatataatattataacttagtaagaccgccgaacctactatagtatatcctataaataatcgggtataagtaattaacttatatatagcttctagaagtgaatctattatattttagtgattaaataaggtaagtattatagaggagtctatagggggaagtagattagtagatcggtagatcgccgatagcgtaaacctacctattttaatagtacgcggtcacttacctattatagcggataatctatataggttatatataaaaaatatacgtctattttataagcgatctctagattcttttataaatatatatctaataatatataatcccttttagggtaattttatttcccactcgctatactagaactatattattatcggtaaagctataaccggtaaatatttagtgtagagtaataatatctttcgaggataaagtggtaattaccggttatcgctctctattaggagatatcctaacctaactatatctcccctagattactatcactagtgtagcctctagaatagggttagttatagtatagctccttataagtcgcggcgtaagaatctctcttaccgatattaacgaaaaggtcctagaggaggctatccggtccctcctaaatagcgataagtatatttctatagttatcgatatacgtaatagtaaattagtggataggtagatctagtcgactatcgataggttaggtaagctagacggtgctataaatatagccggggtgatcacgccttctacgtaaatcactaaggagatagacgacaatttgatagaaggaagaagctacgtaggtggaatatataactcagagaaatgaatagatggactctagagaggagaaaagaagaagagagagagggaagctatctataaatataaggaagtcctaggaagcggggagtcatataataagcacgtgaccaccctaacacccccctttaggactaacctagatacccctattcctactctttatataaaaacctctctttttttttttttttttttttaaatatatagtctttactacctttcctatatattaaaacactcctttctctattagtaaattatatatagactactaaagacctagtatatatataaatctattatatccctccttattaagagctttagtaaacccgtccgctatattatatatcgtatctatatatagtagattaatcttctctctaaagattacgtttttaacgaagaactagcgtatattaagctatctcgtactatttttataagagcgctttcctataagaagctaggtattaatattatctattaagataacgataggttttattatattcggtaggtttagtacgttagtgatttttattagctattagatatcctaggtaggtctattaaaagtgtactactccgttactatagaagatagtattataattatctactttcttagatactatctaattagtatactaccgaagaactagatagccccctctatagactttatattaggttagtccctatataaggcgtctatatatataaagaaagttatatcctagattcttctaagcgttatatatagctctattatcccttttaggtatctatagatctattagatagcttatatattattagtagtaggagctatagaacggtattatagttttataaccgcgaacttgatatccggtcttatctctatagtaagctagtttagtcttttaaagtcttttaataagagatctatataatatatagtctttattatataaataggtctctaggttattattattaatctcttatttctagcttagtaatagcgggataggggttagtatatataactatatttctataagacgtaacgcttctaaggtataagctttttaagatattataatagtcttcttactatagtcctaagaaatagcgctattaagaaagcgtaaaggctctcttatatctttaattttaaactactcttttatctagtagtaaatctactatacttccgtatctattagtatagtagtaataaaattatctatataaactagtaaaaactatactatttcgccttaaccttttatatatatatagggattattatcgagtgcgtaaaaattaatcttatttaatctagtatctagctctttattctataaagctactaaattataaagcctatatagagcttattttaattaataaacctagcctttaattttaatatccggcttatagtatttttaactaaagggttaaaatatatagactatctcctaattatcttataatatatttagatatactataactatattaaattacttctatttatagttctattatataataatagtgaaaataatcttaataagtgtgttttagacgataggtatatagaaaatagagtcttccttctttatctaaaagttcctatatactacctatcttaacgtatttcacaagcgagccggccacacaagcgagccggccaccccacccaacatactaatttcaaatgcatttatctcaaccaaaacgccattaaattaaataaactaaaatcatcatctatctgggcatgtttctcttctatgccctggcttcctacatattccacatgctcgtccggcctaggggggcggtcttaaaccttccgaaacctactcacgatagttgttgatacgcgctacttgggccttaaatggctccgaacgtagctcacgaacatcctgaactgagagatccccttcgtggactatagtccttatagatcgagttcgcttttgctttttcttctcgtttttagcgcgtaaatcgctcacttctttctcgagtaatacggcggattacattatgatctagcaggctttcaaaacctggtttatagcggaattgagcgggctcggggggcttcttaatcttatacgaagcaatgctttaattgacgaagcttacttttataactagatatagttcgagggcgtttttagatcccaatcactaccccggctagagggggggggtaggggttcgaagccgaatattaagctttaaaatcactatctccggtataaaaggtattaaacctatagatcgaaagctatttttaatagtctctaatttaaaagcttcaattcgtgcgagaggatatacttcaaggaaatcaagtttgtcgatataattgattccgttccgcattttcattttaaccatccggccgtacgagcgttttaacaccgcaaaacagccgatatcgagaggctataaaagataagaggaatacggagatatacagattagtatgattttattctctttatagatttcatcgaatctcggggttaaatgacttccgtggccgtcgagtattaaaagccgatacgcccccttcgtacgcgaagaagtagtaggaataaagagctttttaagttagcgaagtccaattttattagaggtctatctattaggactaacctcaaatctctagtcctccgggaggctatcgaactaggatttaataaagactttgcctttaaaaatcatatatagcgggagggcctagctagtagcattcgtacactcgataatagtcacctattctcgatttctaggctataaaagtgctcgccgaccgtagtattcactcctcgttataaccttcgcggttgccgttaaccctatcgtaaaaccagtcttatcaaagttataaacattatcggggtcgatcctaaattaaaggatggttttttaaacaagatcaaaccactccctaataaccttcgggtcttcgcatttcgcacgcttatagttataccgtttcgaaaatcgagaggatagaagaggacgtcgtttcatatagttcgtcacccagttttcgctaacagaaataaccggggtagttccgcgctttttaagaagaaggttcgccatttctcgtaccatagaaggccggggggctactccacgtcgatctatagagagggtccatttttcaagagattcctcttcaatttctgttagtttatacgaattggcgcgagaaatcgcgcggctttggtggccgtttagtcggtcttgaaagtgttgaacgtggtatcttataatagcgcgccagttcacgaatagaagagatttttttgatttttaaaagcctggatagctaataagatcctaccctccttctctattgaatttctagaggattgagagcgaattggtggcatggcgggtggttgaattaactaagtgctaatacatagacgcgttttgggtggggtggccggctcgcttgtgtggccggctcgcttgtgaaatacgttactttaaaactatataccttattatctttagtaactttaagattatatatctattagcttagaagcggagtgattcctagcggtctttgaataatatcgaaagtgtcttttatatagagattatatcggccggaattactcccttcccgtacattcatttagtcttttactttctctgtatagcagccaccttaggtatcacttactggccttaggtatcacttgctaagctattatcgctactttataagcctaatataggttaaatagctaagtatgtctgctcttaacaaaacacactcgctttacttttcttaccccgttatatagtagtagtattaagttatatagtacacttctctcgtttattagttataagcccggttagctagtaactctttaaaacacccttatcgatttacgacgatacggtcgcttactagaaagtaccgtacccctaagtacgaagaaggttaacgctataccttacttctactaacctccgaagacgaataataaagaaaataacactatataacgccgagatatcactcctctataacgactttacttctttaagtattcctaccgatacgggaagtaccgcgagggtataagttatccttaaaagcttagtataatagcggacctagattatatagatagagttaatagctaggaagtctaacgtttagaaatatatcgacctaaagctcgaagacgggaagcggctaaagatactagtaaagctagtccgactagactaaagtagtaagtagtataaaaaggatccggagataaagcgccttactatagaaggaagaacggattattaatagggtgttgatatatttgccccccctttggctattcctgccccccctgcctgattctgcctgattttatggcagaattcttttctgccaggtaaatctctacctttggaatattgatttatatagtaaaaaatgcatatttataataagaaaaaaatgcttattcctatataattaaagcttttattcgtatataaccccctattttacttagtctatatcaaatctctatagtagtttaggccttaggcttagcctaagcaccttagcgcctcgaccacgagtcattcttacactataaccacgagttattcctacgctacgacctcgagttataagactagcgcgctaagtagtaccgcgactcctcgcccctcggcctctacccctaggttcttatgatagtgcgtactcgaacgaggcaatattgcttttaaatttaatttctatgaatctttactttttataaagggtacttatttttattaggggtttatatagtaaatggaggtaccactaggagtgctatacttgaccagagaaatcggtgacttaaaaaggaaggcggtgagaagggcggtcagcggatgcctgaatatcaaggcagggggggcagcaatagccaaaggggggggggggcaaatatatcaacaccctattaatataatcggaaggattataaggtagaccttaccgagtataggattattcgactatccttagaaaaggtagccgaccggattaggaatatactagctattaacctttagcacctaatagttaatatcgataatataaaggagctactttaaatactacaaaaacgcttctcgttctccgatatagtacggatctagcttctttataggttatagtataagcttcttcttatacctattaaagactctatagttaataactagcttttaagagttaagaacctttactaaaagtgtaaaaaagtagaggttaagtttattaaagacgataataatactatttataaccttctctaagcttttataccgctagaaccctaattctactactactagtagactaagatttttaaagagaagtataagacgacctttataagcgttataagtgcttaccgctctaaataagcactttttagccgaaagaaaggaagtaaagctatactagctactttcgtaacccttaatagagaggaggaagtaaaactagcctctttatctaataataataccgaatctagttcggggaagttaaataagagaggggatctaatatatatatatagataaagacacttctttatagtatacccctatttaataaaggtatctaggtctaatagctagaaactagatctagaagttaataagaagatatcggagaatataaaaaagctcctatagaggctttaagataaagtaaaggagctttaagataagctcactttagaagagaaggagactttaaattagtcttacttcgtactaatcgacgaaaacgaagatagtagtttcttaataatactatctttactacctactaatatatctttccttataaatagtatataaagctctattagagatagatagctagttaattctataactagtaagtatatctctaataataagagtctttttattaaatttaaagagataaagaggactctaaaagtagataatactactatatagctctatagaaccggtaaagtccgacttaggactattagacactccggaaagcctattaatcttactctcttaaatataaagtactcctttagtttttattgtaatctaattttagtcgtactaataaagaagtacggatataaaggtaattttaataaacttactattattaataaaaatattagtaagacattctataagctaaaagagattaggaacttcttcgcacttctataagtaggttttatatttctaatagtatttataactactacttttaatataataagccgtataatatagccctttacttctaaggcttctactactcgttagtactagcgctttagctatctatatagcgagtgtatcgaaaagctcgcgattatagtcgataggatagagattattaaggattcctccctaactatagatactaaaccttataatcccgacctctataaaacctactagctaaatagatagtagtagtaaatcttatatagagtataaaggacccctttcggaccgcttagtgttgggtggatcacgtggcatcacgtgatgccaccataggtagatagtcccagacagcctgtcaccttcagtctcttcttttccctctctgtccatttcaatacatacgatactttctccattgattagcatcgtagcatttccatgacttagttatatttattttaatctaattatatttaaactaggatataataattatatctagctttcttatttctatctagataggattcgctattactaaagagagatatataagcggaaaagcggctactaataagctatctatactttcctctctctactttatcactagtttaaccttctaattcgtatcttctatttagataataaaggtttaatagatagtaagactatcacttttcttaaagagaacggaattataatatagacgatagttatcggtaccctagagtaaaatagctttatagagcgatctaagggggtaattattactaaagcgagagcgtttcttaaagatttagctcttttaaagaacctctagctagaagtagtgtaagctactatatatatattaaatagatcgccgataaagctaaacttagggaagtggattatcctataataggaattctacttataaaggatagatacctttactcctattaaccttttaaatctaaaagtatatagctaccgagcctatataaggatctaggggatctcttaattagataaaatatactatagagtagaaattagatatctagttagttatagagcgagtaatatttagaagatctagttcccctatactaatagctataagttcgtttaggatataacttttaataaaagtcttaattataaaaaatatctaatagagcctctaaagatctagtaaaaatagattactaagattattaaagaagataagcttaataaagagctcgaaaaggctatacgctaagtaggcgctatactaattatataaaataagcctaaactaattacttaaagagagtaagacctaaccgatagcctagttaaggggataagcgaggagcttatttaataagatatataggctaaaagcctactatatataggaggagaggagcttatataataatagatagaaaaagatcttactcttatactataagagcgcttcctagctatacctttactaataccgagcgctatctttctcctagagagtcctccttctttaaagactatccttttactagatagtctagattctcctttagaaagtccgctagctatctatctttataatagctctatagtaagcactctattagtagcgagatagtttactcttactactcttttaataagataataacctttctagatagtaattctaataaaactactaaagtttaaagagcgtctaatttagatacaaccgctagtattcctatagaaagagactaaactagtagagagagtagagaggtataattcactttaataagaagtcttagatagttttctaaagatactagttagtaagaataggaactaaagagaagtcaccccttctaatattatataagataagaggagatggaaagttagggaagaccctaatatagctacttatatagtatataataactctaataatatagagggcgtacttactatatttataactagtctttctactatctgattagtagcctatcgatactaagataatctactactagagctatagaactagaaggaagtagtaaactacccttttatagaaggcttctttactatagtaggacttaaggttaaattaattaagctttataggatatataaagtatatcctcccttataggatagaagtatctaaatacttcccctaacctagatatttacctataaattcgatagtaatagctttttagtaaagttaaaagtaagaatctatatctatagagacctctagataattaattcggaggaaaagtacatagctatacttactatatatattacctacgctatctttatacttattactatatttaatctcgatacgatataacttaacgctattaatacctttctaaatagcgatctcgataaagttatatatacgtaaatactagaaagattctataatagaggtaaggtatagaagctttttaaagctctatataaactaagaaagttacaccgcttatagtaataagaagctacttacgtccttaaaaagctaggattcgaatatatcctaaaagacctatatctctttattagagacgggattattatcttcttctatattaatattattattattatatattactagctaaggctttaaaaagcactttagctataataagaactagagaagcactaaaaactttaagaaataggagaagctttatagtttcttagaatatatattctctaagatatctagaaatataagctttagctttactaggattcttatatctcttctatagccactaaatacggacttatatatagttattaatatttaataccgcttttagtaaatcggataaatagatttactaatattataactagagagtagatctataagtattagtagaagctaggcttagctctctatctaatagttattatttatctagatatagcgaaagcggctaactatcttactaagttcttaataaatctaggactagagtactaagacgctataaatcggctaatttagtatctatataatatctaatattaagctctcgagttttatcctatctataataaccctacgctctaattcttaagtaacgcttctttcggtaattatattaattaaaaaagcttagagggcttcttttataagctctttagcgctactattaactagaaagctagtaagtagaggacggttactaccttaataatagaggcggagctacttactattttagaagccgataagatagtaatatagtagaagaggcttcttagtatagtcggacttaattataaagtaggtcttactatcgactacgataataagtagacagttaacttactaacttataagtaactttagatatatataaaactccgctatatatatatttactactactagcttcgctaggaaattagtactagctcgatttctattcgctaggttataactaccgatatatagatagatagactcactaagctacttctatcgtagtcttataaggcttttataacgtctcttagacttattaatattaagcctttagtagaagagtagattatataaagacgttaacttctatagatcctataggtagctcctagaggggtatatcggccggaattactcccttcctatatatttatttagtcttttactttctctatatagtagctaccttaggtatcactttactagccttaggtatcacttactagccttaggtatcacttactaagctattatcgctactttataagcctaatataggttaaatagctaagtatatctgctcttaacaaaacacactcgctttacttttcttaccccgttgtatagtagtagtattaagtcatatagtacacttctctcgttcatcagattattaatctaactctctatagtagcctactatctatctataaatttagactttagagcttatttataggactaagggatatcgacgtctttaatataaagcggcttactattataaataaagggagtgctttacttagtaagaaccttcgatactactagccttcctctctatatatcctacttatcctatctagatccctcgctagcactattattaccctatagaacgtccggtcttacgcgtattatcttcgtcttcggtttcggtagagggttcggtcttaggggacgtagggggttcttagggaagccgtagcgctccggtaagcgtcttatacggcttaaagggcggggaataaaccatagaattgtctcgtcactactaattataacgatagacggctaacgatcctattaaattatagtgtgatcggtctcgattgtggaaatattataagaaatctcttcttatagctataaaaactcctcttctagttattaaaaaggctcttcctctctataagatagagctttataagaaatctcttacgaagtgtgtagaattagttataaaactagtctcggagtcttatactatagtatatcctctctaaatatacctagtaaatatagtattagtgatttaataactactactagcggtgtgagatctcgctaaattagtatctcttcctcttagtaagaaaactcctatctctctttctactaagaaactgcctatctctcttcctactaagaaactgcctatctctcttcctactaagaaactgcctatctctcttcctactaagaaactgtctatctctcttcctactaagaaactgcctatctagctagtgtgtgtaaaaaggttttataaatttcctcactattatcacgctcgatcgactagtgaatagtaggggattccgggatcacctctagtactagaggctttatagcttactttctaggctaaggtagtagtagataaagaactaacacttctatactaagctaatctatatactttctaatcaattcccgagcttagggttagagcgtaggacgttatatagcctactatttagactactatttagcctattatactagctatctctttactagcttttagaaaataggctatcgaattagagatatatcctcgccttcctagatcctagttaacactttaggtattagtggtatagtctatactcttcctagtgtgttcggtcctactaagggttacttttactaaattgtcggctttattagaccttaaattataggttctagcttcctattagtaataataacctacggaactagccttagttaaatcctaggtcttttaaatagctatcgaccctttttaatctagggtcctccctctttatagagtgctccggtattattatccgaattagggttttttagtgctagctttctagccggtactagaccccccttctagttattatccggaccgctattcttatctagtttatctaggaaagtgacgtcctaggagcgtataatttcttttataataggattcttggtgagactacaactagtaggctcagagaagcagaagggagagagttgtattagggagggaggaagcgagctcccactacagctatctactaccagagggtgagggcctagacccacatatggggtctcaccacaacacacccccgtagggcccaacccgaaagcaaagcagaaaccatgaccccattccggctgttatagtaaaaactgcttgtttttatcagtttttaaatccttcttttcatctatttttgtctttttctatgtccattcctaatatatgtttcaatgtatgcaaacctcaattgtcactatatatcatgatttttctcatcttctcgaagcgctctcttcctagcggtttcgttagagcgttagcaatattatcctcgcttaggattaatataaaggacgcaattccagatctaactacgtgacggacgaagtggtatcgtgtatcgagccatttcgtggctttagcgtaattgtccttttttataatagtaaatgcgttatcgctattagtgtaaattgtgatcgggaggtcttcttcttatcggattcctatttagactattactttataaagccatattccttcctatatagctctatctattaccacgtattccgctaacgtgctacttctagcgacaatctcttccttataggaattctagccaattagtgatctagtatagaaaaagatataggcctcggtgctcttcctatcttcgcaatcttagtaagaagtatctatatagctaataagaccgttatctctatttacacttctatttcttctaagtagtattccgaggttcttcgtcccttttaggtaacgaataagttactttagagcgttaatgtcctcttatctaggtatagagactcgccgttaaagcttattaatagctactataatattaggtcgtgatttatcggctagctatcctagcttactaatgtcctctataaacgctaaagcttcttcttttaagacggatggtttattatatacctataatgccatattattatcgtcgttctattccctttagatatctttatcgttctgtcccctttagatgtctttgtcgttctatctttaaacgtctttatcctttagatcccttataatgtctaggcatttatagcctatttttatcggtagatagatataggatatatcctataatccagattttataatcacttccttagtgtatatagcctagttaagaaagatagctccgtttttgctattccgtgataggctactctctaggaatctagccggctttctaaggtctttatagcgaaataggattatagtcttaaactagtcaatctctactactttaaaagcagctattaaggtattatccacatatagtaggatctagatctgcttttctctataaatctagatatagggtttatctagtagaggttagaaacctatgtcttttagtgcatttactagagtttcgtactataggtgacctacctatcggagtctatataaagcttaaagaataaggcagattttatctttcttttctctatctagacctctagttttaaacctagtcggttatcttatatagatcatcaccctattatctattatagtattaagataagctactatataatccacctattcgataattatcttattaatagctactatacttagaaatagtcttatagtttctccgcgtgtaataggagcgtagttttcttaaaagtcgaagccgggacgctaacggtttctataaattacctagtgagcttgaaattcttatatctcgttatctttgttaatttttaaatcgaagacctatttcctaggtaagactatatatctagatagtggtcttagtgctatttcgtatgcctttacgtcttagagctttcctagttacacctttattactttatactatttgtctttgaactctaattttatagctttagcgtatatacggggaattttaactctctatactttaagaccgttctctacacttattaaaccttccttagggactacttccgtagataatatagtaaatctaatgctaaagggtgatccgcgctagtagtcctatagtattaatccttcacttatcacggtttcttctaccgtatattatgctcctccgctattatcccgctctccgtatttcttctatctgatatctatatatctctctagcgactatcctttgttagatctctataatctccgaggactcgatagattggtaggggggttcgataggacggaaggattcgattagacgggaggacttagtgcgataggaaccggttagacgggaggacttgattagataggagatctcggtaggaaaggggtaggatataatctctttagtggatttaagcgagctggatttagtgtatgctatttaactacttattttataagttgaatttgctactattagtgagctgctaatagggaaggggttggagaaggtgtcacttcctatcttattagtgtaggttctagtagaagcgggtaattcactaggtggtatatatactactatatagactacggaggagagaactgttgctatatctagcgatctagggtctctctcctatctcttaaagcttgcaccctattttctagtgtatcctatatagtttctatgttgtagaatatctctatattatcactattaaacgaagcttcttcttctacccccgtaaaccggtgctcttcccctaagctaatatactatccggtatctgttaaaccgaggtctttagctacctatctggctattttgaatagagcttttcctagtttaaactatatcttcggagttataatatcggtagtctcactaatttaaaagttagtagcactattataggtcttcggtgtttttagctcctagaaaataacgtctctataaattgtcacctttttagtcttagggttatagatccgaaagtagtgtctattatcacccttatagcctataagaaaactaatctatacacgagggtctatttttataccctatactctagtctctttagcttagtatacgtataccttcgagtactatatataaaggaataatagattagtagtggtcttatctcctcggagtcctattgcctttctctaggtaagaattagagcttctttcttacctaagcgagctaagcggttaataacgtacgtagtagtatagtatacttccgtctatagctcctttagtatacccccgttaatatatatagtcctagctatctatattatatagtgaccgctaaactcggcgatactattttattcgtatatataagctaacgaagtgctaatagttaggtttttctcttttacccacttctagaagtgtagggatttagtcccgttattatttaaaatctctactctattaggtagtatctagtataattcttaaatatcttagcctataagattagtgtaggtgacgctttacccttctttataatatagatcgttatataaaaacgagaagtattattagtgataattattatatacttacggtcttacttccctatcttacttagtccttttagtttataaaggtatagattaatatatactagctagctaaccttagtcgctctagcttatttctctcgggagactatctttttagactttactttatagtatagtttatagttaaaacactctatactaatatcttctcctaatttatctttattaatccgacctttatagcatcctatataaccgagacgccgatatataagctctactaagattaatatataggaaatagctctatttgcttactactatagtctagactactaatttattatctaacttttataaagaactagatttagcttatctactaatttaataaaagggatatttatactaacgaaggtatatccgatctcggtcttatttttatcccgaataatcatattatctaggttctataagatccctttttgctagcggattgctaggaagctaagtagattaaacctatttccgggtttatagagacattacacttatagttcgtatctagatctatctagtctccggattagaagtataatatcactaacaccttctactcttactctctatcctacgctagaatcctaacctagacctttatctaatttatatactttataagaaatgaatagatatctatttaaacagatatactataaagaactagagtctaaaacctagtctactcccgtacgaagctatcgggatagtatagaaactactaatctagctagtcctatctcttcttattagtctaaaaccggttattcgtattaaactagatctatctcggtctctataattgctataccactaaagttatactccctagctagctttaataacgatactaacaaagctatagcgttaaaattggcctaccgtgttttctccgttagtttactagtaagctactagtctttattcttattaaagatcttattattatagaatttctaatactaaagacctagttttagcttctagtttagtggtcgattcttatagtctagataatagcagattttagtattataaccctacgtattatagtaagaataggcgctattagctatacgctaggttttataatttttctattcttcgatatacttcttagcgtatttacctagcggcggtatatttataagcttatctttctttctatctaatatcgatatcgatactagttagcgggaagcttttagagcttttattacactagctcctattcctctattaacccctagcgctttagccttattatttatcttagtgtaaatcttaagatagtccgttatagaaatctctattactaggtccttaatgttttttatcttattagtcttaatctcgatagtattttttatctccgggacttactctagttccgatattataataataagcgctatatacggataaagctttacttttaagtcgtttatagctttaaaccgctacttcactctattaataaactctattatagtggtaaactcggttcgctatatcctaaatagctttattattactatacttagagtagtgtaaccttccccctatatatatagttttaactaatatataaagttatctactagttcaattctctctctagagttagtaaggttattagtaatatccgggttaatacactacgttagttatcctactacctagattgaaagtgtaacctagtcctcggtattctctatatctatatccggtctctcgatattcttattagttagcctataaaggtgatatccccggagaatcttatacactccgttatactagttatcgaagtcttccttattttttaacggcggctctagcttatatagtataaaactaccaatttttaggagcttatctacctatattctattcgtcctaactatatctagataggtatactagtctttagactttactacacctctactaatagtaggggtgttattattacccgcactaatagcggtgctattgttattgtctacgtcctctatccttcccggatctcttgacgcttatatttaccgacgtgatttatcgatttaatggttgattatcttcggcaaactagccgaattaaggtataaatgatatcttcgacctgattagtcgaattagaatgtatgaaaagggtgatcctcgaactaggatatcgtccgacgaatcaaaaggtgtaaaaagatgaaaaagtggtcccaactaggcgcaaaaggctgtttttgtggggtaaaaactctgatttataggttatgtgggtcccaaatttagcgatccaccccgctgcacgcctatccgcgactctctctacacggaataggtgaatttttggatgaaaattagatcgttgtaatctgctcttcttgttgatgaaaggtaatgaaagctctgggaaagagaaagggtcataacctggtgagactacaactagtaggctcagagaagcagaagggagagggttgtattagggagggaggaagcgagctcccactacagctatctactaccagagggtgagggcctagacccacatgtggggtctcaccacaacaattctataccttaaagatatagccgttttctcctttataactaattagatatccccggaatactcgtactcctaacttctctaactaaacacgagtctctcttaaaatatagataaaaataaggaagaccctactgttacagcggtttccctacaactacaggggttagtctaaattaggatttgtctctcttggcatcccatttttaatactagtgccatttattatggtatataccaccgtagtaaaaaacacagcaccccagccaccttagccacatagtactttgatgaaattaattaattgatctgatccatacctctattaaatcatatgatctatatagggctaatttactagggttattagagcactctatatatattagtaaatctatccccgttataaatagctttatttttaactgcatttttgactgtatttgtgactatattttcgactacattttcgactgcttttttaactgctttttatctatttaagatatctttaatagagtatacccctaatcctaatcctccgagcgaatattttcttatcctatttatactactagattaagctatttctcggtcggaaataacggattaatataaattaactctctataattaatatacaccttttagatacttaaaaactgcacttttaggggtgctagtgcggtggaattaatagtcgatacggggtgctaaggctcccccctttaataaatctgcacctctcccacttctataactactttttaaacctctatttctctatcaaaatcgcattaattactctataaaaaatactagtatactaagaattaaatgctcttttcaatggtatcaattttatatttttactataactaaattacctcctataattcacctatattatgctctaataaccctagtaaattagccctatacagattatgtgatttaatagaggtatggatcagatcaattaattaatttcatcaaagtactatatggctaaggtggctagggtgctatgttttttactacggtggtaccataataaatggcactagtattaaaaatgggatactaagagagacaaatcctaattaggactaacccctgtatttatagggaaacggctataacagtattgtctcccaaaaataattactccctatatacgaaggtgctttagattaaccttcgtttctcctatactaagataaggtcttactactagataataattagggtcttacctattttagggtttactaggcggttataaatataaatagcggtatttatataaaaaggctagagagagtctagaagcttagtatctatatttattgtcctctatatttagttaatatagcctcttatacgctccgctatactattagacttaggtatatatataggtataagtttaaaaattattcccttactctccctctatatctagaatttatagaattcgcttcctctattaatacgctagatagctaggtatctactatagagaagcttctaccgcttatagaatttaattatatattctataatcttatctttagtacgaaaataggggcccttagtatatcgggtatagttatctataataggaatctaatatttctctctactagatctagggggatttatagtctagatattagtataaaattttatactaggctttttaatacgttattatttatctcttaagatctatttcttcgctttcctaagctaatatactttataattaaagttatagagcttaacttagttatctttattaagaagaatagtatccgctaaagaagctttaatatatagtttaccgatatatcctagacgtctatatattttatatatagagactaccttactaactctattaaagtctttatctttatcgttagacttagagctagagttaggcttataaaaatatatcttttagaccttagttaaaatctctatctttatattttctttctttatatctttagcttcgctttttactttataaaaaagcgggccgttaatctatagaagtccgctaaccttctttactaggccgacctcctcccggtttatacgtataagctttaatataatcgggttataataaatcctataatctacttttagtttctacctttcgaaaataaggtcttctataaggtagtagtatatctttactagataacctttaatactataatagggatatttatagctattaatatactatagttattagtttctttattattccgcctactagtcgatagtcttaccttttactagaccgtttttaaagaaagataacgtttctctctctatttttatatctatcttagtatctaacgaagtattatatccgccgctatagccttttctactataactatatctctatctactaccgccacgctagttctctatcttctatattacgtttactatagtagaagtatctaataaagtaggtatattataagcttctataattagctttttatataagttattaaaatcgtcttttataatactctctagaatagtatcctttattatctagtagataaattttactaaatctagttctcctttaagattataaagtataataaatattataccgaaagggtacggctctaccttatataggtctagttagttatactatatctaatacgctataatataggtattagcgctagagaaatctaatctccggatcttataaaacttaataactttacgtctaatattatctataatttctatactataaataagagtctctactttatatattataattgtgacgatctggatgttatctggatgttcgactgcacagtcacgtgatgatgtttgttttagacatgtgacaggacagatcagggctcagggttgaagtcgacagggttttctgctagatatctccgactcgagatctgcgcacatagaaaggatcctgtagctgacaatcctttcctctttctctttccctctctatacttagtattctgaattcaaatgcactcttttcctataaagaactagcaggtcatataatactaagtactatctcaatttctttataatagtacggctgtacaaactatcaatttaattggtttcggccctatcatatccccactttcgttccttagcactatatagctaagaccttgacccacattgatcccggacctataccgagaaccaccgactaattaagatagtcggtccgagacgaaacctacctataaatcgggatagacagcctatccccgtgcctaataaagagactaagtaagaaactatcgctacttataacctatataccccgacccccgatctatagagactagttaatactagtgaacgtgataaagaagaagaaccgattagcgtatagttacgctagacactaagaagtaaaagatttgttaagcttactcgtgatcactagagactataaaatctagtctaggaactcgaagataagagtattatactaagagtaaagagaactaaacctaataatactatagaagcactctatattaagcgagataaggctatcgcctatagagatatcgctatccgcgaatatagtgaacttaccttctatctcttaaatctttaaggttagaattagtatagtaccggcgtaccgattatagaggccgctaccgcttagaagtctactaaaatacctaatatatctatactaaataatagaaaggaagtccgatttaagacttaagaaactataattcgctagaaactcgaggtaaacgctaactattaccctttacctatttactataagctctatatctagagttattataaaggtaaagcttagctatatattactccttagataagctctaatactagtatcccgtatatagacgctaaggatattatcctttacctaaagactatcttcgcgaatctaaaccgatatatagaagcttatactatatactataagcttaagataaaactaaaggatagtttcactaatttccttatagagtttatatagctcgccgaagaagctatcgttattaccgaaaactataagcgtaatctatattcgaaactcctatatctactttagagttttagagttaagttatataggtagttaactaagatactatcttattcgatatatttatatagagctattagagtatagcgtataagattagtctctagtaggaagtaaagacctccttatatacccgatctataatccccgctaccggtgctagaggtatatccgccgcgaactagttaagcactccctatataaaacgcgagtacactccgagtctatctatttccgaaagagagaccttaataagagaaggacgatactttaactataaagaatatagatatataacctataattatccgaagaagaaaccgactctcgctattacaataactacttctactataaacccttcctatatagacgagattatagagcttaaagctaataccgatttaggaaaagttcctacctaggcgaagtctccctcctaggtagatagaaggtattactattttcgctagatttatagaagttaattagcggtcctagagatagcttagtttttaatatatagctaatatataatagacgcttatttttaattttagcactcggtaacactagagtagatagttatatttttattaattcgttaatagttataatactaggtaagcgtttcggacttagagtagaaaggctaggctataaatacctagtgcgaggttttaatagtaaactagtagaactaatatagtatatagccttccttataatttatatcgatagaaggatttaacgatagatccctatactaattatagacttaggaagatataatattattctcgggcgaatatagtttaccgaatataatatccttctcgattaccgataacaccggataatttagttagataaaagaactctcttcgataaagtggcgagtaagatctctatcctaaccccgaagactatcctatagagatctctataggacgatatccactagaaggatataaccgaagagatcgtctcttcgagctaactaagataactataggagtgtagaagtagaagttaaaaaaagatatctatccttacgcttataagcgttagtatagacactagtagatataagagtagagaaagatagtatagaatattaaggataagatactaaatattccgctctcctataaaaaagaagataagcctccctttcctataattaatattagtgtaattagaagagttagattcgatagataggaagtatagaagaaaagaaaccctataggaggaatcgagatctttactacctcacttagtgagatagatcgaattcttactataaagtcttctatcgaggaggaccttaaactctaagagattaagaagatattaccgctagagtatcataatctagctaaagtgttctcgaagaagaagttagataaattacccctatatagacccggtgtagatcacgatattattcttaaagccgaagtgtaactaggttactatcccctttataaactatctcttaataagctaaaggcggtaaaatagtatattattaagaatctagataagggctttattatactaagcgcgtccccttatatatccctaatcctaatagtaaagaagcctagtagtagactccgcttctatattaacttccgaaagctaaatacaattactaaaaaggactattacccacttcctctaatcgataaagtgctttaacgaactagtaaagcgaagtactttactaagcttaatattagatagggattctaccggattcgtttaaccctaggagcggaggatttaataacctttaggatacgatatagatcccttaagtataaggtaatactattcgggttaataaatagaccggctatattctagcggtttataaataatatcttataagaatatatagataaatacgtagttacctttatagataatatccttatctatagtaagactcttaaagaatattaacaataggtaagagaggtactttcctatctatagaaggctagtttataagttactctcttaaagtataaatttactatcacgaagactaaattccttaggtttattataagtatagatagtatcgcggttaatcctaagaagatctaggtgatctagttatagaagaccctatcgatagtgaaagatatataatccttccttagattttataacttctatcgacgatttatctagggatatagtttaatttcgaagcctctatatcgcctaacttaataggacgtcctatataaatagtctacctattataaagtagccttcacactcttaaaggagaagctagtcactataccgatactctattattataatctagtacgaaaaataagagtagaaactaatactttagatagtgtattagaagtagtattatcttagtactataaagataacgatttctagtatctagtagctttctatttaaaaactatataagctatagagttaaactataaagtgcgggataaggaacttcttcctattattcgtatattataggaatagagactagagctcgagggtcttatataataagatcgttttaagattcttatagactattaatctctagaatactttataaccactcgataaataaactaacgataggcgaggtagagcgagttcctcttataattctatttcttaattaaataccgactagggaagaagaatattatagtagatatattatcgagaaaggagtcactttatatcgataatagtaggtagctaacgctcttactagaggactatctagagaagggagtttatccgctagatctaaacctaatctaactaaagaacgtataagaagttattaatagggtaaaataggtaaactaggagagtttagagcttaacgagttctaatagattatagtagaagggagtaacccgaaatagatcctctaagacggacttctcctctataaagaacgcctagaagttccggataaagataatctatatactagactactcgataaggtatatcggtaactaataaccgtatatcctagtatagaaaagctaaagaagcttatctctataagatactattagcctaggtagatagtagatattaagcgatatatagataactacttagtctataaacgaactaaagtatagagggatcgggtccctagactactataccccctccctatcctagagagaccttagtaatatattttaatagatttccgcttattcccgaaagaccgatataggtataacactatctttatagtagttaaccgctttagtaagagactaatttctattccctactataaagatacgaatataaagtagatagctcggttatttatcgataatataatataaactaccggtaccctaaagactattatctctaaccgcggaggatagttcgtttctaagttctagactaagttctatcgaatccttaggattaagaggaaattattaactatatactatccttagaccgatagttagagtaagatcgcgaattagtatatagcctagaggctacgactatatattaaatagaactaggataattagttagaaatactaccgatagtaaatttcgtagcttctatccttccttaagatactataaagaagtccccgttctttatcgagagaggatataaaccggctatatccttcgactagaaagactaggaaatagtgacactaaataaataagacgctatatagatacttttagacctataagaaatctagaactagataaaagagtagattacgaagttataatagttataaatctattaggcaaatcgatattagagagaggaagattttaatattaacgacttcgtttttataataacgaaagactagtagcttacctagctaggtcggaagctcgctcacttagcgagtggtctatataagattattagtaagattagtaactcttacgaacttaatctaccggattcgatctaggtacacctagttttctatactagtaagctataaaaagtagcgactaccgagcctttaataggatagtatattaatccccctccgctaattagagttaataaagaagataaatagaaagtcgataaattactagatataagaatatattaccgaaagttatagtatcgagtgtagtggttaggatatgatcttaatctataatagtatcccgtaggaaactttaagcatacactatagaaggttcaagaattctatgactagtatccttctaaactaggtcccctaatacgtttataagactagattgatacttcgaagagtgatattatactcgataaatatattgataacgataaactagcatttagagactaaatgtagttttagccgggggttatataacgatctggatattatctagatgttcgactacacagtcacgtgataatgtttgttttagacatgtgacaggatagatcagggcttagggttgaagtcgacagggttttctgctggatgtctccgactcgagatctgcgcacatagaaaggatcctgtagctgacgatcctttcctctttctctttccctctctgtacttagtattctgaattcaaatgcactcttttcctgtgaagaactggcaggtcacaataatatctatataatatagaaaggcttctactcctcctttaagaatagtaataatctcttaatctagtagacttttaatctatctataagcaatttttaactagtattcctaaatatcgtacttagggtctatctcctataattagggtagtttataattagctattttatcgatacggactatactaagtccgttctcgatctagcgtttctatctagtaagattactactatctaataataatttaatacctttatttagtttaatttccttctcctctagaaggtttataccttaggtctaaatcgctcgtttcgctacgctagtaaaggaagaaggttagatttagatataaggtatagggagagagcgtaataagcctttaccggcgttattatcctcggaattagttatattaactagctaagaaaagtagagtcttctcgatagaaagatctctagttagaagtagagagacacgttttcgccgactctcgctaagaatatagagtttttataatagaaaaatctctatttataaatatagagctcttttaataagaaatctctaataaagaaatacggcttataataatatcttactaccttaataatagattcgatgatccttattagggtgcgggacgggccgaagcgcgacctataataaaaattctgattcgcttagttaaaattgataaaaattgataatttttgaagatactcggagtcctcgagtaaagggctttataacctaatagaaggaagaagctacgtaggtggaatatgtaacttagagaaatgaatggatagactctagagaggagaaaagaagaagagagtgagggaagctatctataaatatgaggaagtcctgggaagcggggagtcacgtgataagcacgtgaccaccctaacacaattaggattttatatttactataaatacacgcggtatattcttctacctaagggcttagctaaaagctataaaggccggtggtagtatcgtaagtcttatcttagtgtcgaatcggagggatataatactaaaacccttttagaataggtttctactataagcgtgttcggataaatgggcggccccggtgtctcggcctattacgctagtaaagtagctattattgggttaatataaacggtagtaaaggagaactaatatattcgagttaactatatttctctcggtaggcctagtatgtaatacacacttttatattagttaactaaccgtttagggtccgttaatacgcctctctccgctagtgaagatcctgaagatgtaaagcgtggcttataaaagacggcacaaaagcgacaggtagagctaggggaaatcgcaactgttatcgtatttcttctcagtgaagaggcgagctttgtgactggggcggtgtacaatgtggatggaggttggatgtgctgatatgctgatgtgaagccaaattgctgttgttggacaggttgttgctgaggttgctggtgaacagcattggcagatccgccagctttcaaatgacagtttctggtgtaatggttcccaagtgcattgtgcaacttgcaccagatggcatccttctcatggtcctgcttctttttgtcctttttgtttgaagactgtttgtctttatcatcagatttggacttgtcatttttcttcttatctttcttgttagacgaagcattggaattggaattcgaagcagatgagtccttcgtggatgtcgtattggctgagtggttaaacgaattggaattggaaccagagttcgtaatgtgattagaaccctctgtcattgtaaagtcatgataaacctccactatgaagttaggatctttcaaatccggtctcaagttttgaatgaaggtgtgacatcgagagttaccctgaacagccttgacgaagaaattgaggaccatatctggtggcacgacggagtttcgttgctggatttcaaagagagcttctttgaacttgcgcacgaattctatagggttgttgtttttgtattgcaaattgacgaggatctcaaagcgtttgaaattgccttgctatgacgaggtgccgtactctgcacgaaggtgcttgtacatatctcgtgggttgtcaatgttttgcacataagaggcaggaatagcttcaagggtgccgaaaatttggttataacaataaatattgatagaatcccacttgtcaacgaggacttggtattcctttataagctctctgttctcttgcttttgctttcgaacaagctctcggacaagagcttcggagataggagtaggtggggtattagatcctaaagcaagagtagctgcagttgcattatgttcagccagttctcgtagggtttccggtgatttatcaccaaggtccggtggggtgggctttatgatagtaccctggatgagctcaacatagatcttgttgttacccctaagggtcatatataacctatgctgctattgggcgaaattggattcacccttgagctttggcacaacttttgtgatgtcagactccttctgtcgatcgaaatcgtatggtgtcgacatgatatatagggatgaaggttgaacgggattaaacggtcaaaaagaaagggtgatagggttgacgaacggtctgggtagtcggcgtgagaacggtctaatgatagacggtctggtcgaaaggctttgacggtcgtaaacaatgcagaagtgatgcagatagatgaaatctagatgcagatgaatagagggttctgattggtccaatcagaaatgctcggaagcggggtgcagatcgaagcctcgatctggaaaaaactctgctgcgggcccacacagagttttcttggcgtgacgcaacttcgccaagaagtgaggtaattggggatttgaagcttattgtaagatagaggcttcaaagacaggcgctcataacctgatagggacagactacagagaaaaggtagtgtgctctggaaaatagatagatgcgtgaagaagagaagaaactatctacaggtgagctagctaaagtgtgagggagcatgtgaggaggtcacgtgacctccaacagaagatgacgaggatgaaggtcgcatatcgagaagagaatagatacgttggtcttgtctttaggttgtttactcgtagactatggtttctggctcagcatgtgactaagtaccacagtttgctttcacctccgactttcattctcaactctctgttcttcagcttaccaaccattttatcatttcacgattcctcctctcgtcaaatcaatcatgggagttcctcgatcctggttccctagtggactagatgaaggcgacacggtcaccctcaataagcccacccgctcggaatggataatcgacaaaatggtcaatacgcacagccatcaatgcgaactgcagtctgctgactcatacgcaagtgttctgttcacttgtcacaatgctgccgatggccaagaggcttttatacgcgtttacgtccaagttccacataccggttacgagcacgcggaccaagctacccgcgcgcgagaagcaaccgacttcacaccacccgagctgaaggcatacgaatttctcaccaaaaaaggctcgcaaaatacgcctcaattgctcgcatacaagagaggttctcaagatcgctcaggagtagttcctagggggcatattacatggattgtgtgggagaaggtgcctggaaaacgcctaggagattacaaatccgcctttgtgtactgggatatggactgtgagcaacgaaagcgtgtccgagaggccttccttcgagagtttccgtgagtggaacatctttcaactaccacgggaaatgctaacgtgatcattattataagtgcggctaagaaaatgggatactttccaaatgctgccaggcctcgtaatctagtctgggatgaggaagccggtgccctgtatgccactcatcatgcttatgatccgaaggttcgactgacgtatccctacagttattttgttggtttccgggacgccatgcctttcaaggctaaaggcactttcggcgaagagtggttcccacgttttgatcttgctaagccccctcagcgtcattacagatcaaacagagattacaatggtgatatctcggactggcaactctgatctgatccttggttcaaacgatagggcagtcaactgttccttttaactatcgtagcttattcacaatccaattgcttcagtcgtacctagccttctcttcgtacacatgtactcgagctgtctgcaccagggctccttgactatccatctgttatcacctactcttcagccaatcttttcttcaacttcactatccatctgatatcattctaccttttaaccaactttttcctttcatcctgttcacgacctcgtaacctattcactttgaagaccccgtgagagcctgcagtccgaatgaaatctgatgtggtactaacatattgatctcatcagaccatcgcaccaacaaaccccactcgagaacgaaatggcccagatcattcatctagcagcccaaggcttgcttaccgaaccccttccacccctcagggtagggcagaatcacactgatagcagtgccatccacaagatcgattttgtgggccaattgatgccctggcctaacttcgaacgtgaagtcattagggccttctcgtcaccaaacatacattggagcaatgatacccccgatgtgcgtattgtcggggccggagcgcgaaactcaatatccgaggaacaattagtcctcggagacgagaacggggtacaaggccgtctgaatgaacggcttgggcggccggtggctgctgcctttcaggcgcagcatcatcgactccggatggcagatttcaaggctagtgcgcctgcggcagctggataccaaagggtcccggacttcgtgatcctcgaggaaacgtcagttgtcaaagtggtcggggaggccaaagctccgtggccctcccaacacttgaatatactgagcataggggtagaagactttgagtccggacaagactacatcattcggcgtaccctaggtatggtatacacaccccccctgatatacccgtgcactaatagttatcctgtcttataggtcaagttgcacggtatatgcgagagctggacatcaagcatgccttcttgtcgacctatgatgagaccatttttctcagaaaggtcgacatccgaggagtttggactctctagtactctcctgtaattgcatacgacgatcagtatgctccccagttgggggatattaccacgcggcaagggcttttctatttagcccttctcgggcaatctgatcccgcgtttacggggagcactggaatcgctcggcggaacaagaactggactgtttcgcgagagaaccagtgagcctcgtagtcaacacggggtcagattgtctgagaaggctaaatagaaaagaccccgccgtctgctggtcgttgtatgcagtcacgggagggtactacagagtccagattcatcggatttcgaccttcctgaggttgataaaaaaaatggtctctaggatcgaatggtcaagtccctcccagtccgtcctaaatcttaaccccaacccccggtaccctaacgccgccctcgaaacccccttcatttttctgatgttgtggacgagcctaccgcgcaaaaggcagagcatgatctagcagctctcagatattcacaatgaaactcctgcattcctactttccatttctcttcctgtataccccctgtagttctcgtactacctaagtacctaggtaggttaatgaacttaaggttggtctttcctcgagcaaacacaaggctggcggaaatatatccctagtcagactagtgtgatttaggtggggcccggggagtaaagagagaaagaaagactggaaatagaaatgatttcgaatattacagtaatattcggaatcagttttacctccaatttctctctctctttaattcccgaggccccgcatataatgcactagtccgtattaggctatctttccgctcagcttgcatctaacaacgagtcacagaaaactacggtaatcgcaattctttgccgtctaaaatctttatagttctccacatttaggaacgcgcacagattttcgtatcactactcacgatatctaagttcataatagactgtgattgatggattggtggagaatttaatctgtctcgtttgaccgttgctatatgaattatagactaagacaggtatatatggcgttatattgttaaacaatatggatacatcaatagatgattttatataccttgatctatctatgagcggtatgtagacgataaatcatataaaaatagatgatcgatttggtgctaaacgacttcgagaccccgacaccctttccgtagatcataaattagaatttttagcgctacagaaatcattatcgcgattgagccgtaatagacattcaaaaactgcgaagtaccctactatattatcgcactactagtatatatctcatcctatttacctatttggctctctctttatcgcctaaaatcctatcacgtattaaagtaagatggctaccttgactcccgttcctatgactctttctaaagacaaagtaccgactaaaaagaacgtcagggatattatcggcacattcctaacggaagaatggctatctatggatccagagaccctgactgtgttatactatgtatcgtttgttaacgcccactgtcctgtggagcgaccgaagcccgctactggcacacttactaaggccttgaaggtgtttattaaatttcataatgacaccgaggggagtctcgaaatctttaagcctctagcaccaaccaagcataaggaagaaacaccggtaacgatagcacctaacccgctaaagaccctaatactatcgatagcaatagcgctaagaagaagaagaaaggtcttcggaagtagcctactaacgataaagatatttataactacgcacgcgagatacgtaatagcaccacctagaaggacgatagcaatatatactctttctatagatttagaccgtacgctataaagagatacgcttatcttagcgagactcccctatctttataggagctatccggaaatctctaggcttattcaaaagtaatttagagagcttagagataggaaggataaagtaatatagttatcgccgtaataagctcggtagataggaccaataactagttacttaacactagttctagcaaaactcttatatataatctagaagacttctatacttactagatagattatcctaacctcgcttacgtatataaagactactccggtaagagagtggttacactagattatagagagattattatatacgtagctctactaaatagtaagaatcactcctttataataaccggatactatagtcccggaggatataggaagctctttagtatatagaagcttctagaagagtaggatatttcttacgatacacgcactagatatctaatagacggtaagggagatattataggatacgtagatacgtcttctagcgtcctataccttattagtcctaaagataaagacctaaacgaagtcctatctaactccgattctaactcggataaagaggatattaacactataaataaggtgatagcttacgaagtataccgatatctcggttataccgaaaaagcttgtattacttctacgctatagtatatagagtagctaggtgataataaatagtacggtatagaatattttgactataatacctattttcgtagcaaatcgaaataaaagatatcttataaaccctaagctagagtgtaagacgtagtatagaaattctacgttaatatctagctaattaaacccactagactaaatagggagaattactagctactagttatcgacgacgctacccgcctaatcgagggaattatactaaagaataagagcgatactttttataagctcactaccttctataagaagattaagctacttactagcagataccttagtatctagaggatagatagcggtactaaatttaaagagtttattaaatagggtgaagcgaagggaataactttcgaaatcacacctccgtacactatagagctaaacggcactataaagcgtttcggcggatatattaataatatatagaggactataatcattaataccggcatattagaggatatatagctatacataatagaaactactatttatatctataatagactagtgaatctaaagactaaggtctctccgctcacgcactagcgtaaagagctagaaattaagaaccctaaaccctctcttaagtaccttcgaccctaggggtccaccgcttacgtgtatattctaaaggcgaagcgcatataggcaaggaaagcggctcctagaccttagaaaggaaagctagtaggatataagggggatagaggtcatatttataaagtataggaccctaccacaaagaaggtcacgtcctctcgtgataccggctttctatagctaggagataaagataacataggactaatgctagttcaaccccgtcctaatcctaaagggccaacggataacagtgataatactatcggctttataccaatttcgctcacaaacgataaggaagactctacacctaagaagtagtaacagcagattgtacgcgcgtagctagcatagacgccagcttagcagagatttatacagacgcccgtcacgccgtctataattcaccttcctaccatttataggagcgtctctactatactagagacaccacgtaagaaaccgcagcaaaaggctattaccgcaccccccgtacgtcagcgtaagcttttttaaacccgtttacccattattcataaagagcctatcatatctagagtaagactagattttactaaaacactagataggactatataggccacttcccaacagaccattcagtaggaagcttcacagcaagctaccccaatctatcagagaaggactcatttcggagagaggctacgcgcattttcagcccaaatttctcagttaaccgagggtataaagaaggttcataaagaagctaacagaattgagaaatctgcaattgccgagtagagctctaagatagctacattagagagaactacaccttccccggagagatagagagcggattatcaataccctttctctcccctaattcaacaagctacttctccgtagcaagctccgtagcaagctccttagcagtctatctctatatagtaagctagtgtgtcaccgcgtcgtaagatcatataggctatagagatagcataggatacaccttccagcaataaaaacacgcctatcacagcgagatcagagatatcactaagccgtaagatcatctcaattaaatcctcgcctaacccaattatataagaccctattaccccggtccccccccctccccgccgatcgagacgagcgaacatcggaattccccccgagcgatactataacccgaagcagaagctactcgccgtcgagcataagaagcgagaccgagatatatagcgggctataacgagagcaaaagcgaaggacttaggaggtaataacttaacggagggtagtggaaaggggtctacaggacctagaagtacgggatatagtgctactataacggctacgttagcggaaaaggttaatattaataaaccattcctttaaaataatagaaagctattgtatataaaagacgttaatttactatctacctataagtaagcctagaaaagccctttttagacttaataggaggatactatataaaaataacttaataatctagtagcaaaggggatatagagcctaattcttaaaccaccgaaagctaaaattctgcctagatagtggagatttaccgtaaaaactaacacacgtaacgaagtgtacggctttaaggtaagataggtcgtttacggtaacttctaggagaaggacggtagagagacatacgcccctatagtagcggaatatataatcaagatagtatttactcttatcgctatctatagtcttaaatagagataagtggattttaccgtagcgtacctaaatgcttcacgtgaagacgtagagactatctttataagataacctactagcttcgagtacgctaatactactagagataagaactaataggtgtacacgcttaactaggcgcttttcggactaagggacttagcttacctttagaataaagagatagatagtaagctacgctagattagtttttatccgctagaggataacccctatatctatataaaaggtaaaggtataaatttgactattataataatctatatagataactttattattaccgcgccgtaggataaagatatatagtaagttatcgatacacttcgctagttctataatataaaagaccttagtgaaccgaagtagtatttaaactacgtattatatagagactatactaataggactattataatatcctagatagcctatatctaaaaggttcttcgcactactaatgtctctagatagaaagagacacccctactagctatatagagagagatagtagctaacgctataaacgttctcgataacgaagcttttaactagtattagtctattatcggtatactaaagtagttagctattaagacgagacctaatatccgttttgctataacccgtctttaatatagactagtaaaaccgacgttttctaactacgaagcaatactatatattattaagtatcttcgcagtcacctagaccttactatcgttcttagtaggactaataaactccgctttcacgcgtatactaatacgtcctatactaattaggaagatagtaagtctaccgagggttcggtatagtatctagctagttcacccgttatataggctactaaaaagcagacaattatagcgaattcaaccactattactaagtagtgcgctcttaatcaactatatagggatactatatagctaaagaaagtcgctaatttattccaacttccgctctattatcctaaaatctacacggataatatcaattcctagcttcttctctctaaaaagggaggaaagttagcaaatcgatagctaacacttcgatacttcttcgttaaagacgtagttacgtaaggatatattaacattaaacgtgttaataccaagaaaaatgtagctaacggcttcacgaaagctctaagcaaagagcaatttaagacctttaccaatctgcttagtatggtctaaatcttcaatttacaactataacaatatagagtttttcaacatcgcatgtaagagataggttttgcatagagatgcagtcaggtctataagggggatgttggaaggatcacgtgacatcacgtgatgccttcacaggtagatagtcccaggcagcctctcaccttcagtctcttcttttccctctctgtccatttcaatacatacgatactttctccattgtttagcatcgtagtatttccatgagtttttaatataaatactatttttaatagtattaccttagtaaaaaatatagcccctaaatatctctagctatagagtacttctacgatcggccctccccactttttatctaattattttaatccgattataaagctccctataaatcacgtgatctatatagggcttatttactatagttaaccgagtctatatataaataaaaaaatctatatataaatataatattaatttatattctagtttcttatagtaaaagctttatttttacctatatttaaaactaatttaaagtaaaaatcaaagtacgtttttaaaccgataaaaatagataaaaataggtataaaagtgataaaattaataaaaaagggggttataaaagtataggtaaaagtgtagcttttactataggagactagaatatttatagggggaccctagtaaataaaccctatctagattatatgatttatagggagctttataattagataaaaagggggggggggggggggggtatataaagattagaccgactatagatatactctatagctagagatatttaggggctatatcttttactaaagtaatactataataaatagcacttataaacaaaaactaactactaagagcgacctttccgaaaggggcactagtctattactagtaggtaaactctattactaatagcgcttccctataataataaagggttctaactatattataaactttagttctaactctaattcgtttaactatttagctaatacgatattaataaaggatttaactactacttcgaatattaattctaatactttatctaagaaagataagaagaataataagtctaaatctaataataaggataagtagtctttaaataaaaaggataagaagaagtaagactataaaaaggatactatctagtataaattatataatacacttaggaactactatactaaatactattatttaaaagttagcggatctactaatactatctactagtaagctctatagtaataacctatctaatagtaataatttagcttctaatagctataataaatctctatcttataacccggttaaattataggctagattaataactaaagtagggtgatttccctcctaccttagtagtagagagtactttaagctaatactatctaccctactctctctctttagtaaggtccttcctcgggagaccccttctttcggtataataacctatttactaacgcgctattttaaactaacgtttataggggggtctatattatatctaaagaaggactaaccggccctataatttttttataaaaaatacggacccttataagcgagggtctactattagggtggtcacgtgcttatcacgtaactccccgcttcctaggactttccttatatatatagatagcttccctctctctcttcttcttttctcctctctagagtctatctatctatttctctaagttatatatttccactacgtagcttcttccttctattaggttataaagccctttactcgaggactccgagtattattaaaattatcaatttttattaagtttaactaagcgaatcagaatttttaaatttttattataggtcgcgcttcggcccgtcccgcaccccactaataaagattatcgaatctattattaaggtagtgaaggttatcgatattattataggccgtatttctttattagagatttcttattaagagagctctatatttataaatagagatttttctatcgtaaaaactctacattcttagcgagagttagcgaaaacgcgtctctctacttctaaccggagatctttctatcgagaagactctatattttttctagctagttaatataactaattccgaggataataacgctggtaagggcttattatactctctccctatacctcgtacctaaacctaaccttcttcctctactagcgtagcgaaacgagcgactcggacctaaggtataaacctcccggaggagaaggaaattaaattaaataaaggtattaagttattactagatagtagtaatcttactagatagaaacgctagatcgagaacggacttagtatagtccgtatcgataaagtggctaattataaactaccccgactataggagatagaccctaagtataatatttaggaatactagttaaaaattgcctatagatagattaagagtctactagattaagagattatcactattcttaaaggaggagtggaagcttttctacgttatatagatattataatacgcgaagtagagactctcgtttatagtatagaaattatagataatattagatataaagttattaagttttataagatccggagattagatttctttagcgctaacgcctatattatagcgtattagatatagtataactaactaggcctatataaggtagagctataccctttcggtataatatttattatactttataatctcgaaggagaactagattcggtaaagtttacctactagataataaaggatactattctagagagcgttacgaaggacgactttaatagcttatataaaaagctaattatagaagcttataatatacctactttattaagcacctctactatagtaaacgtagcgcggaagatagagaactagcgcggcggtagtagatagggacgtagttatagtagacgcggctatagcggcggatataatacttcgttagatactaagatagatataaagatagagagagagttattctttaaaaatagtctagtaaaaggtaagactatcgactagtaggcggaataataaagaaactaataattatagtacgttaatagctataagtatccctactatagtattaaaggttatctagtaaagatatactactaccttatagaagaccttattttcgaagggtagaaactagtaaagaatatctagtattatagtattataaagcggttagtaaataataagaagaataaaggtaagactagtatagcttatataaactccgcacgctctatagataagatataaatactagatagtagtgcttctaaaactattattagttactataaagatttttataagtatactaagtataagctaggtaaaacgctatatagctatactaatactaatagtaatatttaatttataatagtatatagtaaggccctaatctagattaagacttcgactagaaaagtgagaataatccttatctctacctactataacctattaactaaagatagactactatctataaatacactagaagtagattataggatttattataacccgattatattaaagcttatacgtataaaccaggaggaggtcggcctagtgaagaaggttagcggacttctatagattaacggcccgcttttttatagtataaaaagcgaagctaagaatataaaaatagagattttaactaaggtctaaaagacgtatttttataagcctaattctagctctaagtctaacgataacgaagactttaatagagttggtaaagctatctttacgtacgaaatatatagacgtctaggatatattagtaaaccgtatattaaagcttctttagcggatactattcttcttactaaggataactaggttaagctttacgactttaattataaagtatattagcttaggaaagcgaagaaacggatcttaagagataaataataatatattaaaaagcctagtataaaatcttatactaacacttagactataaatccccctagacccggtagagagaaatattaggttcctattatagacgactatacctaatatactaaaggtccctattttcgcactaaggataagattatagaatatataattaaattctataagcggtagaagcttctctatagtagatatctagctatctagtgtattaatagaggaagcgaattccgtaaattctagatatagagggagagtgagggaataatttttaaacttatacctatatatatacctaagcctaatagtatagcggagcgtataggaggctatattaactaaatatagaggacgataaatatagatactaagcttctagactctctctagccttttcgtataaatactactatttatatttataaccgcctagtaaaccctaaaaccggtaaaaccctaattattatctagtagtaagaccttagtataggagaaacgaaggttaatctaaagcacctttatatatagggagtaattgtttttatctatattctaagagagagaagttaggagtataagcattccggggatatctaattagttacgaaggagaaaacggctatatctttaaggtatagaatcctactataaaagagattatacgctctcgggacgttactttcctagataaactagataagaatactagatcggataacgactagaaagggggtctagtaccggctagaaagctagtactaaaagaccctaattcggataataacgatatcggagcactttatgaagaaggaggaccgatattaacctagattaaaaagggtaaatagctatttaaaagacctaggatttaactaaggctagttccgtaggttattattactaataggaagctagaacctataatttaaggtctaataaagccgataatttagtaaaggtaacccttagtaggaccgaatataccgggaagagtatagactatactactaatacctaaagtgttaactaagatctaggaagtcgaggatatatctctaattcgatagcctatcttctaaaagctagtaaagagatagccgatataataggctaaatagtagtctttatagtaggctatataataataaactatatagtaggctatataatatcctacgctctaaccctaagcttaggaattaattagaaagtatatagattagcttagtatagaagtattagttcttcctctactactatcttagcctagaaagtaagctataaagcctctagtgctagaagtgatcccggaatcccctatttattagtcgatcgagcgtaacgatagtaaggaagcttataagacctttataacgtatttcacaagcgagtggccaccacaagcgagtggccaccctaacccaacataccaatttcaaatccatttatttcagccaaaacgccattaaattaaatttttaaaaaaatatcatctatctggacatgtctctctcctatgtcctggcttcctgcatactccgcacccccgggggggttttgtacgcgattgtaaagctgattcaccatgctgaccgggaccgggttcagctgcttccaccggctgtgtaatcagcacagatgcttcttgcactgagagaccgctctctgcgtatagatgcttcccagatctagcacgcttttgcttcttcttctcgttttcaccgcgtaaatcactcacttctctctccagaagtgcagcggattgcatcgtcatttgacaggcttttaaaacctgatttatagcggaattcagcgggcttgggggggtttttgatctggtacgaagcaatgctttgatagaggaagcttgcttttccaattgcacacagtttgaaggtgtttttggatcccaatcactaccccggctagggggggggggggggggggggttggtgtagtaagccgaatatccaacttcgaaatcaccctatctggttcaaaggggactaaaccggcagattggaagctgtttttaacagtctctattttaaaagcttcctttcgtgtatcagggtaagcttcgaggaaatccaatttatccacatgattagatccgcaccgcatccggaattcaaccagtctcctataagcccgttttaacactacaaaacagcctatatccaaaggttgtaaaagatgggataaatacggaggtatacagattggtataatacggtttttttcgcagatttcgtcaaatttcggggttaaatggcttctatggccatctagtattaaaagccgatatacccccttcatccgtacagaagtggtaggaataaagagctttttaagctaacgaagtccaatttcgttagtagtccagccgttaggactaacttcgaaacgctagtcagaaggaaggctatcgaaccaggattcaataaagactttgcctttaaaaatcacacacagtggaagggcctaactagtagcattcgtacactcaataaccgtcacctattcacgatttctaggttgtaaaagtgctctccgaccgtagtattcgcttctcgtaatcaccctcgccgtcgccgttaatcctatcgcgaaaccggtcttatcaaagttataaacgtcgtccgggtcgatcccaaattgtaagatagttttttaaacaagatcaaaccacccctttataacctccggatcctcacatttcgcacgctcgtagttataccgtttcgaaaaccgagaggatagaagagagcgtcttttcatatagttcgtcacccaattttcgccgaccgaaggaaccggggtagtaccgcgcttttcaaggagaagattcgccatttctcgcactatagacggccggggagctaatccccgggaatccatagagagaatccatttttaaagagattcctcttcagtttctgtcagtttatgcgaatttgcgcgagaaatcgcgcggtgttgtacaccactaagccggtggcggagagttatacgcgggactttgtaagtgcgagcagcgagagcaacagatataatatctccatttttaaaagcttagatagctaataagatcctaccctcttgctctgttgaatttgcagaggattgggagcggattggtggcatggtgggtggttaaagaagaaggtgttaattcatggacgcgtttttcggtggggtggccactcgcttgtggtggccactcgcttgtgaaatacgttatataaactagctagataggtagtttcttagtaagaagagagataggtgttttcttactaaaaggaagagacactaatttagcgagatcttataccgctagtagtagttattaaatcactaacactatatttacctagtgcatttagaggggatatactatagtataagactccgaaactagttttataactagttctatacacttagtgagagatttcttataaagctctctcttatagagaggaagaactttcttagtccactttttattaataataggaagagatttcttaggagcctttttattaactaaaagaggagtttttatagccgcgagaagagatttcttataatgtttctacgatcgagaccgattagattataatttaataggatcgttagccgtctatcgttataattagtagtgacgagacaattctatagtttattccctaccgtttaagccgtataagacgtttaccggagcgctatagcttccctaagaaccctctatatcccctaagaccgaaccctctaccgaaaccgaagacgaagataatatatataagaccggacgttctatagggtaataatagtgctagcgagggatctagataggataagtaggatatatagagaggaaggctagtagtatcgaaggttcttactaagtaaagcactccctttatttataatagtaagccactttatattaaagatattgatatcctttagtcctataagtaagctctaaagtctaaatttatagatagatagtaagctactatagagagttagattaataatctctatataaaagacactttcgatattattcgaagaccgctaggaatcactccgcttctaagctaataggtatataatcttaaagtcactaaagataataaggtatatagttttaaagtaagatagatagtatataggaacttctagataaagaaggaagactctattttctatagggcaggactacagcaaccccccccccggctagatcgacccccccctgcctgaaatattagtcaccgccttcctaattgggtagttcgatacctcgacgcctatttctgcctaccgccttcctcaccgccttcgaggtttcacaccgccttcgtgtcaaactcccctaacactattggacgatagtagatacctgcaatttatatgtaaacacatagtaaaaacaagtcactttagtctcatatatgttgtaggactcgagcagcaatcaatctgataatgcaattctggtttatatatattatcctaccttcttccaacccattttttcgaccaaatctatcagttttaatccctttttttgcattatttccatcctacttttatcattctagcgaccaaaatggcctctttaggcctggcataccttgattcgtccgatacggaccctatttcggactgtgagatcgtccccgagtccccacctgcgctactaagcaccaatcccaccatacccgcactgctaagcaccaatcccaccgtacccgcactaccaagcatcaatcccaccgagccacggatgcctctcccgcctgccaataagcaatacaacgaccctgagctcgctctcgaagagatcaatgaccttatcaaggattccggctatacagtgactagccggcgtacaaagataactaagcggggggtaaagaagacagtccggatctgctatgaccgcggtcggacgaatccgcatgataacgatgacgatcccgattctgaagtatcttaaccctctagaaatcagcggaagacaataacaattgcggccgactgcctatttagtgtctcgcttcgattctcccagctcacaaatacctggatctttactattgaaaacgaatcacataaccatggcccttcgcctgcaagcacctataatatctagcggaagctagaggttaaacggaagctcgatattatcacgtaacagctaaagcaaggtctcgctacccgctaaattatcacaagtcttcgcgaaagtgaccccaattcatgtattatacctaaggatattaacaacctacggatacagttaaaccgggaatttctcaatagtcgtacgcctatccaggcgctactacaagagcttcctaaggacggaaattggatcttcaaatacgaactcgatgacgatcaatatatcactacccttttctgtatgcataagacctgcgtcacaatgctacaatcgaatccctaggtgatctctatagactgcacctacaaaacgaactaatacaaactccctttgcttgatatcgttggctttaccgtaactaggtcaactatatatcttggatttgcctttatccgggataagaagcaagacacttatgaagttgttcttacttgtcttgctaaagcatatgattcccttggccttgaatacccccgtacgatactcactaataaagaggacggccttattgctgcaattgagagcgtgtttcctataacaaagtctatagtatgtatctggtatatcaatatagcaatcctaaaaaaggctcgaccgctccttttagaacagatccgccaggctatttcccaggcaaattcctaggcaaattcctaggcaaattcctcctaatcccgaaagacaaaggcctagatatcaaaggaaatttaggagcaggttgataaggcttggaagaagatactaaaacgctagaatcgtattgtgtacgccactacactagaggagaaggatcggtagtgggagttcttcaaagagaactataaggatccaatttataagcctctccttcgctatcttaaagatgaatggcttgaaagctgccctaagcgttttctttatattcatatatccaaatacctttacctcaacgagagagcaacttcgcgggcagagtcagcctattggctactgaaacacgatctccatgtcttaacaaatgatcttcttgtcgtcctccgttgttttaagcgggttgtttagtatcaatttgataaagtccaggcggatattgcaagcgagaagatacgatagccaacaaaaccttatccgctttataaactgatcacgactaagatatcccggaaggtgatttagtagataaagaatacatacgatagatacctactagaaaccgaggataagcctccaattcctctagtttacagttgtgattcaaagaatacgttaggattcccgtgcattcatatactaaagcagtattatgacgataataagagcctcgaaccctccctttttcattaacaatagcatttatacagctctagtagtcctccgccaatcgatcctatactcctaatccaagatccaatcagggtacgaggacgagggcgtccacgaggagcaaggaacttgataatcacactatcaaccccccactctagcacgcaggccaccaccatacagtcttcccctgatcccctaacgcaggatcgatctacgtagagagacccctcggacttcgagtatgtgttatcacaggaaggaggacgcggtcgaggacgcggtcgaggacgcgggcgaggacaaggacgcggtcgaggacgcggaaggggacgcggaactatgactaaggataccaatgttagcagtgacagtgacagtgataagactgggactaggactgggactaggggaagacgtggaaggggccggaaacgcgcgcggggacctggttgagaagctcatttaacctatatgtgtaaacaaatgcttaattcaatgagaatgtgcaattttttctgatcaaaatgcatgtttttttactatgtaaactggaattcctatagtggtggcagaattatatggcagaaatctctgcactggcagaaagtaaggcagaaatcctggtcgcacccgattaggaaggcggtactgaaatttcaggcattttcaggcaggggggggtcgatctagccggggggggggggttgctgtagtcctgccctttctatatacctatcgtctaaaacacacttattaagattatttttactattattatataatagaattataaatagaagcaatttaatatagttatagtatatctaaatatattataagataattaggagatagtctatatattttaaccctttagtttcgaatactataaaccggatattagaattaaaagatagatttactaattaaaataagctctatataggctttataatttagtagctttatagaataaagagctagatactagattaaataagattaatttttacgtacttaataataatccctatatatatataaaaggttaaggcgaaatagtatagtttttactagtttatatagataattttattactaccgcgctaatagatatagaagtatagtagatttactactagataaaggagtagttcgaaattaaagatataggagagccttcacgctttcttagtagcgctatttcttaggactatagtaagaagactataataatatcttagaaaacttacactttagaaacgctatatcttatagaaatatagttatatatactaacccctatcccgctatcactatactagaaataggaggataataataacctagagagctatttatataataaagattatatattatatagatctcttattagaagactgaattagcttactatagagataagaccggatattaagttcgcggttataaaactataatactattctatagcttctactactaataatatataagctatccgataggtctatagatatctaaaagggataatagagctatatatataacgctcggaagaatctaggatataactttctttatatatatagacgccttatatagggactagtctaatacgaagtctatagagggggctatctagtttttcggcggtatattaattaggtagtatttagggaagtagataattataataccgtcttctatagtaacggagtagtacgctcttaatagactagtaagggatacctaatagctaataaaaatcgctactatattaaacctaccgaatatagtaaaacctatcgttatcttaacggataatattaatacctagcttcttataggaaagcgctcttataaaaatagtataagatagcttaatatacgctagttcttcgttaaggacgcgatctttagaaagaagattaatctactatatattaatacgatatataatatagcggacgggtttactaaagctctcgataaggaagtatataatagatttatatatatactaggcctttagtagtctatatataatttactaatagagaaaggagtgtaataatacgtaggaaaggtagtaaagactatatattaaaaaaaaaaaaaaaaaaagagaggtttttatatagagagtaggaataggggtatctaggttagtcctaaaggggggtgttagggtggtcacgtgcttattacgtgactccccgcttcctaggactttccttatatatatagatagcttccctctctctcttcttcttttctcctctctagagtctatctatctatttctctaagttatatatttccactacatagcttcttccttctattatctactatctagatataatagattatctatttataacgtttttatctaaattactattttcactttaaactagcactaccctactaactatacctaaagctaatagagaaatagagattaagatagagaaagctattaagtctctctctaattagtctaaacccaatattacgaaaactacgcataaattcgcggtcctaatatatcgactacgccggcgataataaggtagaaaatcacttttttaacgataacctaatagtaggaagcttactactacataagagggagctttatataaatatattaattactttaatatagtcggagtatcgataaaccggcgctaaattgctatagctatagatttaattctagaagaagaccactaggatatagatatagatccgctataaattagcgcttactagctaaaacggtttctaaaacggtatctagagtactatatacgatatagaaaagctctcgatatcgagagagtatctactctagataaattagttatataaaggtagtttaaagactacgaaagggtgatagctaagcacgggatttactagtaagatatctataattttaacgaactagcttctaaattagtgttagaaaggattaatttattattactagatatctaaagaagaagctttttaatagatctattataaactataaatctattactattttaaaagctatttctatagatagttttacctatcccccgcttattatcctaagcgtaaagtaagctttattacgctagtttaatattatctaagaagataacaataacactttagcgttctaatagatctagcttttttataaatatactattagctatatattagatataaaaagactagttttatataaccgttttagaagctctataacgcgtaaattcgtctagttttataagaaaaataatataatattatttttcttactatcctatactagttatatactataacctctcgatatcggagtgtttagtgtatataaacactagtatagtaaagcggtagaagctactactataaccggatactataaattctcaaaggataaattcctatgtttaataggggagattcgccggaaaacctttaaactagggtattgatactaccacccccctttagataataccacccctctttagataataccaccccccctacctaaaaatttagtaccgccttcctaattaggtgcggccctagtttctactatactttctactagtatagagttttctactatataattctactactactataggaattccggtttatatagtaaaaaaatatatattttaattagaaaaaattgtatattcttattaaattaagtatttatttacttatatagattaaatacgctacttatacacttccccgcgcgtttcctcgtcctcagccctatcctcggccccgtcctcggcctatactactagttttaccaccctctattatagttatattagctcctcggcctcgtccctagcctcgcctacgtccttatccctatccctatctatcttcttacaaaagcgtatattcgaatactaatagttctcgctaggtagatcgatcctaggttaggggatccggtaaagagggaatattctaggtgctttactaggtgatagtgattaggtttctcgcttcctatagacgtccctatcgttaaacttaaagaggatcttaaataagaaggagagggttaattaggggtatagaaacactatataaatactagtgttagttgcataaattaggctctaggctcttcttatcgttattatactactagataatatatatatataggaatctagacgtatacttcgagttatagttatataatctaggaattagtgctttctccggtccctctggtaggtatcgtctatagacgttatctatatactatatcgcttttaataagatcctcttaactagttataaatagagcggttaataatatataagtattttaatcttcttagtctcgatcttatttataattcgactaaattatagttcgataatacgtttaaagttctagagaattactagtaaatcatttattaatactagaagatcctattttaagagctaataggctccctctatccgagaagtggcaattttattaaagtaaaggtattactttatatagaaataaaggaacttcttagggcaatccttaatctatttagcctatatatagttaagaagaggactaaaaattagatcggtatatctctctttaaacacttcctattatatattaaagttattaattattaaggtaaaaacgactcggttctatcgctttagtatcttcttctagcctttattaaccttctattagagctctttagcttcctagtcctttatacgatagcggtagcgagcggagccttaggttaaatccgcctaggttaaatccgcctaggttaaatccgcctagcttcgagcttcttatatagcctttttaagctaattagaaagtagcgggcgtaccttctttataatatttatattaatatactataagtagattatattctttatctctaggaagatatccttaatagcgtttatcctatagggcttactccttatcggttaggattatataggggggatctagtctaagagatttagggaaacactattatcacgctaggtttgactaatgttaggccactagtacccctttcggaatagtaactcttagtagttagttttcaatataagtgctattttctattgtattaccttagtaaaaaacatagcccccggatatctccagctacagagtatatctacggtcggtcttatttttacccgcccctcccccctcccctttttatctaactataaagctccctataaatcacgtgatctggatagggtttatttactagggttaaccgagtccgcacacaaatgaaaaatctgtatatcaatgtcaatgtcaatttgcattctagtttcctatagtaaaagctttatttttgtctacatttttgcctacatttaaaacaaattaaaagtcaaaatcaaagggcatttttaaactaataaaaacgggttataaaagtgtaggtgaaagtgtaggtaaaagtgcagcttttactataggagaccggaatgtttgtagggggactcggcaaaaactagcaaacaaatcctatctagatcacgtgatttgttcaaaacatgtgaaaatcgatggatgacaaatcgataacaaatcgataaaaagtgataacaaatcgatagaaataggtgcaaaatagataaaaataggtgaaaattgatgaaaattaataaaaataggggtataaaagtgatagaaaggggggtgtaaaggtacaggtaaaaatataggtgaaagtgcagcttttactataggagaccggaatatttatagggggactcggcaaaccctagcaaacaagccctatctggatcacgtgatttacgtggagcttcataatcagataaaaggggggggggggggggtaaagatcagaccgaccgcagaagtactctatggctagagatattcgggggctatattttttactaaggcaataccatagaaaatagcacttatattaaaaactaactactaagagttactatcccgaaagggtactagtggcctaacattagttaaacctagcgtgacaatagtgtttcccgagatttataggttttagtaaggtactataggataactttatagctatcctccttcttatcctttataaaagtaaagctaagatagtaggttaaactagtagtagagaacctaacgatattaagtaatagtatactatatcgatttatcttatatatataatctatagaaattacctagggatttaattttagtatagcgatacttattatatatatataaaataaagtagtaatatagctcttatcgtcgatcttatactaaaagatctaattactatcctttagaagctctattattaatacttaaagcggggtacgaccctaaaggaatcggctctaaaccttcttccggtaattatatatatatatcacgggaagttatataagaattaggatccttgcgtattctagttataatcttataggtaggtagcccttactttagtatcttcttaagatcctcggcctttataagaacctcctatttccggtaagcggggtagattaatagcggcgatagtttataattatacgtataattctctatagttaggacccactaatttatatcccgaagccgaagggaaatagcgaaaggatagttaactataagtgtagttaattagcgcttacgctctacactatcgggaccccggtttcggtatatacgaccgcggttatagtatagtcgaactatcttctttacccctatctttatagtttttaaacgaagttaatagagatagactatagggaaaggtagtatactctagaaaatagataaaatacgtgaagaagggaagaaactatctaaggaggagctagctaatgtgtgagggagtaaaggaggtcacgtgagctctaacaccccctataacagaatatataactatctaccttatatagttaataaccacccttctcctaataaaaaaaactagatataaagatagtaaaaatagtaaaaataagtgcttttaaacggcagatttaacaccctatttttatatataaaccggaaatcaaaaatccttccgatatttatagagactaatctaggaaagctagcggcgaaatatgtttttagtaaggggtttagttatcctatcggccgctatctacgctataggaattttcacgaagtatactaatccggtagctacttccttacgaagtcgataaaaccggatagtaatatattttattatagcgtgaaactcgggatttaaggctaaagcaattgccctattattatctacgtaaatcggaattagcttttttaagaaacctttaatactaattttaataagtagttatataagctagagtgcttcttaaacggtaagcgccttagtaatatactcgctctctattattaataaagtaacgtagggttatttcttactagtctaggaaattagaccgctagctatcttaaagatagaaccggatatagaaagccctttttcgctatatagactaccctagtctatatcacaaaatctgtagagggtagatttagaagaagtagtattagattttaacttagacgctaggaagaaagaaatagagaggttctttaatcctataaggtatcgaaagacccttttaaaggcttaaaaatatagttctctagggttctttatatatctaggaagtttaattattataaaagagatatctagtctagttaaaactattaactagattaaagtgccgatttttatctaatactcttttatctatatctttatagcggtactatcgaaaggtattaaaaccgctttattatctattagggtagcgatagtattatattttttaagactaaagcgagctagaatctagttaacgtagttagactaagataaataaatttctccgtcgtttccgtagtgtacgttaatagtaagatatctcttaagaactcccttatctaagatattaaagtgcctagaaatagtagttttaaaatactaaattatatctccggagggggatagaactagtaaattatcgatatatactataatatagaggttattatctttctttataaagatagagtgatctacctatatataatagaatcctatagagattaggacgttataaagaagctaatactactcttaaagactttattttagtctataaatggttttttaaagtaatctaataaattaattagtaggatagttatcttatatacctttagggagtttaattttaataggttcttttagctctatataaagaaacgtagttataatatctatataatataaaaactagcgcttagctatagtaatagtagtaaaaatctaaaaaaatattagtttagctataatagtataaaccttataaaagtctagatcttttacctaccggaaaccgtgggctactaagcgagctttatacgtcctattatatttaattttaaagacctagcgaagtgtaagaggtttccggctcttatctcttactttcgagcgagagataactctctaggtcctatttttattatagcgggagagctctttatatatagctactagctatttatctttttccgcgtaaattattacttctttctatctattaggtttaaaactaatatcttacggttttaatttagaaggtacgtattactctttagaagtaatagtagtaaaaagctttattaaaatatccggggagctagtaaggaattataatatattagtattaaagaaagtcctagaagcgagactattaagataggcctaggagggcttctttagtctagttaaacgtcttaggtctatagatatattaatagagatagataaagaaggtctatatactatattactagtgttattaggaatctagtctataaaggaatagtcctaccgagaagcgatctatatagtatcctaactagtataactagtagtagcttcctaactaagagtagtttcctaagaagaagactatattcctaaactcttattttatacctccactctcgaactaatactacccgctattttaaccttatcgtcgatcttaaaggtattctaatttagaagtcggtcttctatttcggaaatcgggatcctataaagtacggtaggatcggacggatcgaggggtagactcgctagtctaaagagatctatattatctatatcttcgatagtaggagagggaggaggggattcgaaacgttagggaatcgcctaaattttagcacgaatagggtctttattaggtaaaaacggattactataatagtcgtatttattaagaaaattaattaggatataacggttagagagagattaagctctctatactagagactataatttagtaccttagctagtaatattaagattataggtaggattaggaaggtcctttagtattagattcttattaaaaataatattttaagaacgaatgatcttcttagtgcggatattatataatacgtagttatctccttcgttataagcgataaaccgagcttcttctatataaggatctagctttatagctcgcttctctttaggaattaggaactagcactagcacctaagggcatatagattagataaatctagcttctttctatagagagctttatatagtaatatactaatacgagaggtataaagtctatttatagtatagtttatactactaagaagatagcctcagagatactttagaagctagtatttagttataatagctataaggggttctataaggtaacggtttttaatctcggtaacgctatttagctactttatatataggggggtagggtcctatataacaccgcgagaagagagataggtagtaaggggtttatacttaggagtattatcactatataccttttttatagtgaaagagaattatatctttaagtatccttctagctatataaatttctttataactttagctctagattttagtaagaagagctagataaaccgggtagtattattagtaaaagagtgctctctactataagatataatagagataggactttagacgtcgagataaataaatttattaggtttagactagatagatctaacttttttaaaaggtaaagtataaccttttcccttaacatagggagtgtatagaaaagtgacactagagcctagttttaatataattctatctatataaatttctatcttttttatatagtcttcgctagtatagtatatacgctaataagtaaggtctataaagatagctataggagaacctttctttatagtaaagatagagttaggagagccggagactagattatattctagtatagtattaatcttatcgatactattatagtttaactagtaatattctcctttatatatagtataactaataatagactctatactagtagtatcttaatacttaaaggttataaagctattctttatttaggttctaatatcttccttattaaaagcggatatacaaattaagctagactttaactctagagctaactagaccttctttaatattagagaaggggaagaataatagttagtctaatcctagtttaaaagctataagttaatatctctatagccttcggtataaaaaatatcacctatagctatagatataggtagtatacactctttaaagttaataaaaatagaccgataaggggttatatatatactaataccggaatcgattatctatttaataatatctctactagagttagctatcgatccttctttagatataatatagatccccctataaacgttagtttaaaataacgcgttagtaaatagattattataccgaaagaaggggtctcctaaggaaggaccttactagggagggggagtagggtagatagtattagtagatcctctagcttttaaataatagtttctagtataatagttcctaagtgtattatataacttatactagatagtatccttcttatagtcctatttcttcttatcctttttatttaaagactacttatctttattattagatttagacttattattcttcttatctttcttagataaagtattagaatttatattcgaaatagtagataagtcctttatagatattatattagctaaatagttaaacgaattagacgactaatttataatataattagaaccctctattattataaaattataatagacttctattataaagttaggatcttttaaatccggtcttaaattttagataaaggtataatatcgagggttaccccaaatagccctaataaagaaattaagaactatatctagcggtataactaagttttattactagattttaaagagagcttctttaaatttatatacgaattctataggattattatttttatattataaattaataaggatcttaaaacgtttaaaattaccttactataataaggtactatactctatataaagatatttatatatatcttatagattattaatattttatatataagaggtagggatagctttaagagtaccgaaaatctagttatagtaataaatattaatagaatcctacttattaataaggacttagtattcctttataagctctttattctcttacttttactttcgaataagcttttagataagagcttcggagataggagtaggtagggtattagatcctaaagtaagagtagctataattatattatattaagctagttctcttagggtatctagtgatttatcactaagatccggtagtataggtttagtgatagtaccctaaataagcttaatatagatcttattattacccctaagggctatatataacctatactactattaggcgaaattagatttacctttaagctttagtataatttttataatatcggactctttctatcgatcgaaattatatagtatcgatataatatatagggataatagttaaataggattaaacggttaagataaaaaagtgataatcgaagaagaggtttcgaacggttaggataaaaaagtgatagagttaacgaacggtcttagcggtcggcgtaagaatagtctagtcgaatagcctttttaatagttataaataatatagaaatgatataaatagataagatctagatatagataaatagagggctctaattagtcgaattagaaatactcggaaacggggtatagattaaagaccttaatctagaaaaactctactataggcctatatagagtcttagcgtgatataacttcgctaagaagtgaggtaaaaacggggaattaaagcttattataaaatagaggctttaaagataggcgcttataacctaatagagatagactatagagaaaggtagtgtactctagaaaatagatgaatacgtaaagaagagaagaaactatctataggtaagctagctaaagtgtgagggagtatataaggtcatatgacctctaacaataatatatagactatcttcgtctatcctagctattaaagatctaagacgtttaactagactaaagaagccctcctaggcctatcttaatagtctcgctttaagaaccttttttaatactaatatatattataatttcttagggaaacgctgttagcaatagagtttacctactagcaatagactagtgcccctttcggaaaggtcactcttagcagttagtttttaatataagtgctacttttaatagtattactttagtaaaaaacatagcccctaaacatctctagctatagagtacttctgcgatcggccctccccactttttatccgatcattttaatccgattataaagctccccgtaaatcacgtgatatatatagggcttatttactatagttaaccgagtctatatataaataaaaaatctatatataaatgtcaatatcaatttatattctagtttcctatagtaaaagcttcatttttacctatatttaaaactaatttgaagtaaaaatcaaagtgcgtttttaaaccgaaaaaaatagataaaaatgggtataaaagtgataaaattaataaaaaagggggttataaaagtgtaggtaaaagtatagcttttactataggagactagaatatttatagggggactcggtaaaccctagcaaataaaccctatctagatcacgtgatttacagggagctttataatcagacgaaaaggggggggggtgtgtaaagatcagaccgaccgtagatatactctatagctagagatatttcggggctatatcttttactaaggcaatactataataaatagcactcgtattgaaaactaactactaagagcgacctttccgaaaggggcactagtctattactagcaggctaactctattgctaacagcgcttcctatttcttactagctccctagatattttaataaagctttttactactattactttaagtagtacgtaccttctaaattaaaaccgtaggatattagttttaaacctaatagatagaaagaagtaataatttatataaaaaacgataaatagctagtagctatatataaagagctctcccgctataataaaaatagaacttagagagttatttcttagttaaaaaattctaaaggctataaaccttttacgcttcgctaggtctttaaaattaaatataacgggatatataaagctcgcttagtagctcgcagtttccgctaggtaaaagacctagacttttataaggtttatactatcgttactaagctaatatcgtttaaaatctttactactattactatagctaaacgctagcttttatactatatcgatattataatagcgttcttatatatagagctaaaagaacctattaaaattaaacttcctaagggtatataaaataactatcctactaattaatttattagattactttaaaaaactatttatagaccaaaatagagtcctcgcgagtagtattagcttctttataacgtcctaatctctataggattctaccggacgtaagtagatcactctatctttattaaaaaagataaagatactagtctctatattatagtatatattaataacttactagtcctatccccctccggagatataatttagtattttaaaaatactatttctaggtattttaatatattagataagggagttcttaagagatatctagctattaacgtatactatagaaacgacggagaaatttatttatcttagtctaactatattaactagattcttacccgctttagtcttaaaaagtgtaatactatcgctaccttaatagataaaagagcggttttaaccccttttaatagtaccgctataaagatatagataaaggaatactagataaaaatcggcactttaatctagttaatagttttaactaggctagatatctcttttataagaactaagcttactagatatataaagaaccctagagaagtgtatttttaagccttaaaaagggtgtttcgataccttactagcttaaaaaacctagcgatatccttcttcctataagaggatcccactctctacggattttataatatagactaggctagtctatatagcgaaaaagggctttctatatctagatttatatttaagatagctagcggtccgatttcctagactagtaagaaatcatcctatatcgctctattaataatagagagcgagtatattaccgaggcacttaccgtttaaaaagcactctagcttatataactacttattaaaattagtattaaaggtttcttaaaaaagctaattccgatttatatagataataatagggtaattactttagcctctaatcccgagttttatatagtaataaagtatattataattcgcttttaccggcttcgcgaagaagtagctactaggtccgtatactttataaaaatcctaatagtgtagatagccgcggatagtataacgaagccgctcgctaagattatatttcgacgttagctttcctagattagtctctataaataccggaaggatttttagtttctagtttatatataaaaatagggggttaaatctatcgtttaaaagcatttatttttactatctttataatctagtctttttattaggagaagagtggttcttaactatataggttagatagttatatattctatcgtaggcgggtgttagaggtcacgtgacctccttatatactccctcacactttagctagcttacctatagatagtttcttctcttctttacgtattcatctatttttctagagcacactacctttccctatagtctatctctattaatactatcctactaataggagtatataaagataacctaagaaagtgctacttcttaaggaaggcactatatggtctaaaacaaagtctaagactttagtataaatatctatctaaaatattagctaaattcaactttagagcattcccttataataagggtatatatataaactctaaagattagtgtatattaatatatcacgttaataatatattatttataggggattgatatagccatgcagggatccctaaaaacgcgaaaacggttgtgacacggttattatacggttttgacagaaaatgcggtagtacatgcgttttttgcggccgaacagtatgaataccgttgcaatataaacacggtagacggaaaaatgcgttttttcccggctaatacgtaaaaaaagaggtaaaaacgtttcggacggaagaaatacgttttcagaagaatagtgaggtattgcaatggtattggaagggtattgccgactcgggtatttagtatattagtttgcatacattcgtaatactagatataagtattagttatatccttgtgccacaccgctcgaatctccgcctaggatattgatctcccgtagttcaccgcctagttatcactacctataggcgtagtactagtataagagggaaggtattgtactatctcttcaccgatagtaacccaacctggtaaatgtttaggatcctatataactttaggcactgctactggtcttccgagtctagtaagtaactagaaaagacgtatgatcctcggctctaactgtaaactccttctatatgttccttcacggacctagaggtcgatccgtgtgttcagttctcgaatagcacagactgttacctagaactatacagatcggagatatagccatatgtcctagacataggcgtcccctttaaggacgttaattggcgcgtgtctaaggtcttctattcggataaaatctggtatgtcgtagaatatcggttcactattagggaacgtagatagtccttctatgaaaatagaggccggatcaactatcattcctttatataggacggatagaggtcgttagcttaagtgagaagacggggagacactaggtatagagtatagtactatatcgcttaagtgctattctagcattagtgtcaatcggataatctattgggtatctatgctatatttaatctggaacttattaggactaatccttcctctagacgatttatatatctatcctaccttaggcgtagtctgctcgtgaatattttgttgatcgggaaccgcattatcttcgccgatttcgtggtaacctagtataactagtagtttagggtctggttctagtgatacggaggacgaggaagctattaactcgtcgcggtcactagagggcatattctattgtgctattgtggtagtctgaagataatattgacgaccttaaggtagaagaaggttggtttaaaaactagatttagtattctcgactatttactaactatagttaacttcggacaaccgtattaccttattctagtttcctctatctagtaagtgtagtttttctttaatatatatttgtttaatctatatttacttaaatatttgtctaaagttagagtgaatcttcttttatttaaggctagatataatataaattataaaattaagttaataggtctaagctagtaggtatatatcttataaaatgtaaaagaacaatctataagtctttataagtcttcacgagtctttacgagtcgttaggggttgtaggggttataggcggtcctcggaaaaatgtctttagacgaggtgttggtactattttagtacgacggcgcttttatcctacgatatagggtggaagttccgtaaatatctctcttcgggccctagatagatctccttccacggtgatctcggactagtatctcttaactatctcctatcgtctgtgggctagtggggaatcctttctattagctcgtgtagtatcatcctatagcttaactttcgtggtaatattagcctagatatctatttatagaatatattagctcgtagaccttctgatatggttctttattaactcacttcgtaagtataattgcctttactcgctagtattcttaagatctaggatattagtaacgaatttaaaatagctaaagaaatcctcttcgttaaaactattatagaagtattaggacaatacttcctcatctgtgattatttttagcggaattggggcgctataggataagttaataatataacttatacgtgtctatctatataagtcttcgttagtgcctaagattgttctatcctataatagtctaatactcacttgtatattacgaagagttatatatttccagtttttaacggactcttaggtatgctaaacgataagcgactatttatacgaggggcgttcgacacttaggtaacactcctcgagaagattctagacgttattaatatttaaatagtataggtagtactagcgtagcttgaggataaaggcttttttagtagggactttaactcgttcgtagtgttccgtatctagcgctaggatacgtcggttatatatcctttttttctatacgggtgtcggggtgatagatatagtttaacttatattattcttaatagtattatatagagactcttcgcttagttgcggttagataggaactaaattcgctagatataaaagagaatctagtgttaggaggctgacttcgcttaactcttagcctagtgttaagtgtaaaaaaggattaatgatagagaggttattagcactatcggttattatagtatcggactcggacgtgacggttaaggaagacggggttttaggtactatcggtagcttaaaaggcctatttattcctttactattgcttccctatctctaaaaagttataagtatagatcgagtcatttttagtcgatagggtatcctacacttctacttcgggtgtgatagggtcgaggggtcccgcctctacccttcctaggtggtggtatagtatctatactagaaccgtattataataagagaatataagataaaagtaagaagatctcgatttagtttgcacttttcgtttcttaagttggtagtgaaggtattaagaatataaggttgaggggaggtggatagaaagttaaaccataggaaggtttagaatttttacacttctctgtttaccttcactcccactaacctttaagacacttttttcttttttagatgtctttaaattcgagaattatatattcttttacgtctaaagtttcttttaaagaaataaactaggtaagagctatatatcgctatattaagcacaaatatagtcgagatatttttatttctcctctaaatcttaccctttcactctttaaatatttacaatcttttagttcgcgaaaatactaagagtctataggttttgcctataccaaatctcaatctatttcaagcttctatagactaaccttatggcttaatattgatcgtaccctatctctaacgaagaagatcggagggatcttctattctttcgataaatatctctctacctctatgccttatgcgccgttcgtgccgactattctataagagtgtgcttcgggtatttctcttactattagattcttttctattctctataggtttggttccttacggctatatagcctcgtttctttcgatttatatctaatactatatcatagattctcctacttccctatccaccctttaactaggccgtaagggcccttattcttagctagactagactcgtgttatatctatttcgcctttactatatctcgtcctaggtatcggaggaggatgacctttctgctcggtagttagccctatacctaactattttctaggcccgaaacttcttataatccgattctaatagttattccttctattaaaacgttctaatataatactaagacgcttaatcttatagtagatagttagagcgtgggctctaatacacctatagataatattaacttatccgagacttaagaggtataagttctagaacgatttactccctaatatagaaattctaatatattctatagaaagtatattcgatactcgagtcgacctcggataaacctcccgattcggagccttatataggcactataggcgctttaaatgatttaacgcctaaggagacctatttgatctttaaaactgctatagaagagtaaagactagccgaggagaataacgataaggataaggatatcctataagaggatagtgaagctaatactgtctgtgctaagagtcctacggtatctctaattgtctaacccgttcctaatatacccctagtatctaatataccctaagaatcctagatatcttagatatctatagaaatgcctctactataatatatccggcctttatctaaatcggatttagattttgaggtagtggaacaaccttaggtgtctctcctaataatagaattctagcttttactattagtatagctagataaggctcggatatctcgtcgctaatactctagtttagtagagatcctttaaactatcaccgatattaaggctctacgtgaattactaaaggatatcataactctaaagaagaggctttgtgggtaactatctttactcctagtgatacgtcgtaagatccctattattctagcgtagcttctaacactctctcctatagatcgttatctttataatagcactataagatatctatatattatagacctaattgctctccttataaaagttctttattctccgatatttcgatccctaatacactatagtatagccgagttcgttgatcgccctagtgagttataggagttatagttatagggagtatcgatatagataatatcgggtgtcttcgccaagtatctagatagttccctaatctttctatctgatattgtttattatcgttattataaggttatatattgtagtgacggacctttaatacgccgatatattatatatattctctatattaggaaatatagaggtaacacttatatccgtgtatagtgtgtcctttaatataccgatgtctctctatctcttaatcgtctcttccggacttaacgattgcctttttagtactttaagctaatccctattaaggatcaggtctttgatcttaaggagagttaagtccttagccgcgtctaagaagtttttatagatataaagtttaataacgacgatatccgtatgatatattaataggtaagttatatatttataatagcccgggtatataataaacgcaattagaaattgaaacctctatagcgaatatatcctattagaggagagttagagattatatactacggtcgtggatttctaattgagactctctataatacttgttatatatccctactatattagttgtttatagataggtttagtctataccggataatgcactatagtattataggagtctatctgattctttcttatctttctacgtctaaccgagctaagagagcgaatgttattcctataacccttagtctatataggagtaactttagagacgtgatcggtagcctaactacactaagaaggcttggccgaggtgtggacattccctagatagatagtgagctaatccgtttagtagcctctcctatttcctttataggtgatataccgtagtagtaagagaactccggcttcctaggtctaggagctaaatattgctataggaaatgtgaagtgaactagatataacgtaacgacctagactttaatattaagtctcttaggcgtttttactacactatataggcctagcgctaggaaataactacctattctaaaaccgaacgaaggaagttctattaggaatataggatatcccttgatccctctcctgttttgtaaattaagcctacgcttgatcttatatcttttttctctttagatccttgctattccgaatatagtggtatatctaagatagcctattaactgcttataggcgagatcctctcctctaaaggtaaagaacactttatacgataacttcgatattttcctttcctataaggctagtataggttatagtctctagtcacccacttagagagttactaactctaagaatacgaaagggctagtattatctttccactattgctctatcgttttcttaaagcgttatagatagacgctaccttttatagagctataatccctatatttaagactacgagtctaactctaaaggaggctattatatatacctttatagtattagcgaagagtaactctatccttatatagagtttaataaactctatagaccgcgtaaaccttataaaggtagtaaaagttgtaagagtaggtctttaaggactcttagaggctactactattgccacttaataaattcgccgcttaaggttaagattagtgtcggttataatagagctagataataagagactaaatagtctagccgatagcgtactcgacacgtatataaacaaaaagggagaagggttttagcgtataagacgctatccgaatatatatatcggtatctattataccgcggacgtaccggaatatttagtgccttagaatagcaatattctagctagagaatcagaacactagtaagaaattcttaattttttcgcattcccttactaataaagttaatctatctagcgaaatgaaggagctagctactcgaagtaatggtcgggagattgagcgcaccctaatgtttgaaataagctttagacggaccttacgcctttatttcgaaggtacgtacctagaggatatggcgataataagtatagtccgtagggctgccgagaaatgcccctctatattcgctagtatatttaatatacctcttatcaatagtaacggaaaggaagataccgattaaatcgaaacacaaatagcacttatcaaacccctcgagatagaattacactcggatattcgggtatagggaccatagcctttaataggttctcaagaattcagaatacctaaccgcctatataaactactagcactattgtaagggaatttgggctctggaccaaattctccgccaaggatactctttccgataaacaagcgtttaccaaaaagaccacttatgataaccggatggttatcataccagagtttccactatacccgcaaaatggaataccccccgtattttccaattgcgaccgagatgatctactttgtggacttgcatagtttatccattacaattatctccccctttccacgggccacgtcctcgtggactatatatatatagtatacgtttagaggccttaggtatgacgtttaggggccgaaacctattcggggatgatatgccctaagagctcgtatcaaggttatagtgtaagtctcaaaggttggcacctagtgctagtgtgatcatgcctgatttcaggacacgtgaccggactagttataatgctcctttaccaagggagagggtagaaacgacgcagctccgtttcgaacccgggccctcggctatccggttatcataattgtaagggaatttgggctctggaccaaattctccgccaaggatactctttccgataaacaagcgtttaccaaaaagaccacttatgataaccggatggttatcataccagagtttccactatacccgcaaattggaataccccccgtattttccaattgcgaccgagatgatccactttgtggacttgcatggtttatccattacaactatatcctttcttataactcctacgcgctatatatactaaggagtactatattctatatttatcttcccctaggatatatactcttcggtggtttaataaggtctcactcttttataggtaagaattaggtaaactagcaatcttaaagtctatatctagaactaacctaataaaaagaactctatagaaacgtacgacaatattaattgggaattttatcgggtcttcccggtactatattgtatacgtactcggtatctttatataccaattaatagataactaagaccgagtctttttgtatatctaacctctcgaggcaatagataaacttgatccactcctcgggctaccgaaactgaaagtctaggaggaaagataagcaattattggtcttcctaatatcataggcgagaagcactacgtgttaccggatcgagatatatctctgtctgtcaccactagtttaagtcataaagccggtaatatattgtcataagatactatattcacgctctacacttagtatattaagttcttctaaagagtaataccggaaatcacttataaataagaggagaatgttacgacctctataccttttattctaagcctaagatgttatatagtattactaaaatattactcttttatatagaaaaatcttctaattatagtgatcttaaaggcgtaactaaaagagtagatagatagtaaccctagaatataccctatattaaaaataaagagaggtcataggtctaagtccctagcgttctattccttcctagtcgaacactctcctttttctatctttatactatctttatacctatctatcacgaattcaatctttgttctgtctacgaaaagctaaagggctattattattctaatgttcactaacgctactattatctaataccactacgagtaagtaagtctaagcactcgatatacggcactataatagcacacctacggcgaagatccttagacagattcttttagggaacggatacaataccattattatctttattaaggtgatagtgatacgataaaccacgtacgatctcggagtataacacgggcataagataagtagaaggattcggctagtattctacccctatatactatcctatttcgaagtccactaatatagcggcgtctagtattcgataagaacctatatataatataacactttctatagaatacctataaacactcctacttcgacgctctaaacttgaaagaggtaaaaccttccttaaatcgaattatcactaacactttgtcactcaaatctagggacgatataggtctacacattctctcgagatattagatctatcggaataaggaccctaaatattcgttatatagaatctaacacaatacggtcgcaatccttatacccttcgtggaaacttataggaacacatataggaacatatagcggatagcggatctctaactagactcggaaaatctaatattataaagtctcccctaatatagaaaatagagctctatactcgaatcttactttcataggtataggagggttaggtatgccctttactagaacaattagagggtcctaatattctaataactagtatacagattatacctacacaatatctaagatcttttaaaacgaaagaggataagtccctaagaatctgtcctaaggtctatccaggaactaacgtctatttgattagggatagaagatagaaactacctatctaacgcccttagtttatctagaacggcgttatatctcactaggtataaaacctatagatattataaatatccgaattaggtaaagctaacgaaaatagtttcctaaatatagaatatcgagatacccttcgacgaatcgttatccctatctaataacaacctatataacaacgacagattcgtaaatcgactatcgtattagtgagaatagaataacgatagatataagagactcgataacacgatcactaagggtagatctatttagagatatattaggtacgtataatataaccccggggcctcttaacacctatagcactaacgtaaagacgtctatataaagttccctaataacgtcgatagaaaaatgaggctccttagaaactttctaaatagcctcgtctaacaccgaaataggcaattgttaaatatgagtttctaagggacctttatcgcaaactatagctaatattcactgttttttatatatagtgaatcgatatagtacgagatataaaggtaagattcctatctattgtcatttcgtgtacggatataatctagtctactaattatacggaacggacgttaaaatgataggacaattatacgtatatatccgaccggccggaagttcaatctatcctatcctatcctcttagatatcttattataactcgttaagactcgaaaaatgcctcacaatacctaagggttatcggagtcgagagtatagaaggataggatctcaccctacaataactatagatattttggacgaagaaccaaggtaggctagcgcgtatagcgcttagaaggtggcttattgccggcgccacgagaattaaggggatcaccgagggagtcacctaatgttaagggaatatagggtgtagtagctataggtagtgctagtaacaatataactaccctaccaatacctatatcatacctgagtaatactcggaaggagctagcaatacgtagtgaatactatatgaatactaagggtgagatctaatactctatgaatactttgtaaatacttagagtcagttctaatacctaatgaatacttggtatatactcggacgccaaagtaatactctcctaatactctcctaatactggtagaataatagaatactcgagaaacacgtcgaatacgtattttctgccaatacgtattggtaaaatcaacggttgtacatgtaggatcctagaaaaacgttttcaccgccaatacccggtcactaccgtattataaccgttttcgcgttcttaggaatccctgcagggagccaccccccccttagataataacaccccccccccctacctaggaaactaggcattaattttaccgccttcctaattaggtaccgcatttacctcgacacttacaccttcctaccgcattccttaccgcctttaaggttttaggccgccttcgtgttaaactaccccctaacactattagacgatagtagatacctacaatttatatataaatatatagtaaaatcaagtcactttagtcctacattaggacttaagtagcaaatctaattctagtttatatatattaacctaccttctcctaactcatttttttatctatatttacactaaattattagttttaatcctttttttttattatttctatcctacttttattattttagtaactaaaatagcctctttaggcctagtataccttaattcgtcggattccgaccctagttcggactataagatcgtccccgagtccctaccggcgctactaattagtaagtctctacctacactactaagcaccgaggcaatactaagtaccgagatcgtccccgaatcccctcccgcgctactaagtaccctataaataccgctcctaccacttagttaatagtacgatacactagaggacggaattaatataattaaccttctcgcctatctatatagctttatagtcttaaccttacgcttaaaaactataaagcgaggtgttaggaagattattcgtctatactataaccgcggctatatataccgaaatcggcgtctagatagtaatcctaagcgtaaacgataaaccactacgcttataattaaatgtctctttactatatcgcttcggctaaattaggagacgaaccttttttcagcgcctgacgagtggttagtacctaactaagataaaattcaccgtgacgttggtgattcacgattactttcaacaaactgacattaattgatcaaaacgaattctagggaaagatgctctaactcaaataaacacaaatattaataaagcagttttaaaagctaaatttaaaggagatgaagaaatattaacaaatatatcttctaatatagaactatttataaagatggtttagacttacattaataccctagtatattttaaatatatatatttatataatattctataagttatatgagtcatgatccacatagtcaaagattttttagttacttaagtttattcacttttatgatgcactataaaattattaattttaatgttattattaaaaaatataattaaaagaatattattaccattctatgctatattaagatctattcctaataaattattaggtgttatagctatgtttgctgctattttagctttaatggcaatgcctttaacagatttatctaaattaagaggagtacaatttagacctttaagtaaaattgcattctttatatttgtagctaatttcttagtatcagttaagatcatagtaataccaccagctaacacaggtaatgataataataataacacagctgtaataataacagctcatccaaataaagctaatttatgtaaacgtatggcttatgaatatttaacagaatgtttagagaatatagatagattaatagctgaacatgaaactgtattaacattagaaagacaaatcatacctaaaattagtgatgcagatattcaatctatagatactgaactacaaattaatgatatgttaacgttatttacgttatggctttatgatttagagatgtaatttcagaaggaacttatttaggtaatcattatagcttatatgcttataatgataaaaatattaatcataataatttaatagataaaaataattcacctatacaacttataagtcagcttaaaggaatataaaaataaatagaaactagctcttactttattacttgaaccaaataatcctattaataaaaataaaggaggtaatatactttcaaaaaagatatagaataataatacatctaaaactaagaatacagctaataataatgtttctaataataacataattactacaaatgataatacattttgagattgtattgaatttcaattagataaaatagctacaggcattattatagttgttaataatataaaatatattgataaaccatctacacctaaatatacatcaaaataacttacttggtaatgttcttcaataaattgaaattgtttactactaaaatcaaaaagaataaacattatcaatatatttctcttataatgataataatttatttatattagttgtatttactttatttgcattattaaataataaaattcagaaatgaactttagcagcaaaatggtcataagataaacctaatattttaggtattcagaaatatcaaccactaaataatgcaaatacagcacctttagtatctcactatcgagaatctcgagtataactatagaccctcgctagtattaatatattcactttaacgtcgctaagaggtctctaaaaagtcggaagagataaaggaaatattttagtaaggccttcctacctataagattattactagggttcgctaggataaagaatcttatattatcccctataatatctataatcttcggagaaaggttcacttagaattcctcgccggctatacgcctctctaaatattacttatagaactctctaaggacggtaactagatctttcgatacgaagtcgataatataaactatattaccactttattttatatatataagactagtattactatacttaaaataaacccttggattatttctatagattatacgtataagataaatcggtatagtttactattactcgatattatcggatttactactataggattaacctactatcttagcttcgcctttataaaagataagaaggataatagctataaagtcgttcttaactatcttactaaggtatacgaatcgctcggccttaatcctccctatataatctttaccgataaggaataagcactaataaatactattaagactatcttcccttctataaagaatataatctatatctagtatattaatatatatattttaaaaaaggcccgtctaatcctttaagattagattataaaatcccgcatcgaattaactaccctattaagcactacgccgttaagcacctagtattaaataaagaaggactaaaagagggagcttatctaaaaggtagataaagggtagaagaagatacttaagccctagaaccggattatatatactactttacccgaagttataaattagtaataggaatactttaaggataagtataccgatctaatcttctagctattaattgactatattaaaaaggagtggcttaataactaccctaagcggtttctctatatctatatatcctaatacctttatcttaataaggtcgcgacttctaggatagaaagagcttactagctaattaagtaggacctataagtgttagttaataaccttcttattatcctataatactttaagcgagttattaagctttaatttactaagattattaataagatcgagaataataagattcgaaggctaactagtgttttataactataccgtctactacctagacgagtctcttttaaggctatttaatatactaaggatatttacgatagatatcttctagaaggataggaaggtaaacctctaattccactagtatacacttataattcgaagaatatagctagcttcctatatatttatattattaaggcgtataaagataaggataatagccttaaccctaagttattccactagtattagtatttatatagtatatctacactactaatcaatcctatccttctactctaagatcctctctaggttcgacgataagggcgtctataaggagcgagaaactttatcacctagtaaagcactacctagtaaagcactacctagtaaagcacttaggttattctatcgtcactagatccccttatataggatcgatctacctagcgagatcccttaggattcgaatacgtgcttacgtaggaacgaggacgagaacgaggatagggaaggctatagggacgaggatatagacggggagcaactataatagagggtgaaactagtagtgtaggccgaggatagggtcgaggacggggatagcgcgcgcggggacctagttaagaagcttatttaacctatatatataaataaatacttaattcgacagaaatatacaattttttctaattaaaatgtatatttttttactatataaaccggaattcctatagtggtggcagaattatatagcagaaaactctacactagcagaattatatagcaaaatctagtgtcgtacccaattaggaaggcggtaaaattaatgcctagtttcctaggtaggggggggggggggggtgttattatctaagggggggtaggtatattaatcccctatttatatataaggatttaagctatataagaaatatagtagctaaaattagccactatataaagatagaagaaactagtatagtgttaatatttttaggtaataatataaaaattaattactagataaaaacactatatatagactaaaagggttatatagataagttattaaataaattctctataataaataatcctagttataagcctattaaaatactaggagaaccggggctaaaattaaagaaaaatattactagcgtaagccctagtgatattagtgattattaaaaataaatagggtctttactctatttagccttagaaactaggcctaatataacctttactactatatgctatactagatatataagcaatcctagtaaggagcattttatagcccttaataggatatagaaatatttactagtatatcctaaattaggattagtatataaatacttaggaaaggacctatatataaaaggctattctaatttagattagggtaataatctaaataaaagaagatctatattaggctatatacttagtctaagccctaatataggattaaataatcctattagctagaattcttaactataaaagactatagcatttagtagctagaattcttaactataaaagactatagcatttagtagctataaagctaaatatatagctctaaaggaagctactaaagaagctatatatctagctaatatatttaattatttaaataaagagctagatttagggtatatacctagtatacctataatcttagttaataataatttagctaagaaattagctaagaatctagagttttataagcgattaaagtatattaaaattatatattattttataagataagctatattagaaggaaaggttaatataacctaaataccttctaaatatatactagctaatttcttaacgaaaaacgttaattataccttatataaatcttatatagatctagcttagctagataatatataagatataagaaactatagagcactcttttttaattataatattttatcctataaggttttaattatatattagtttttaacgagattttatagctatatatactatatactataatccttatagagactataaggattataggggcctattagtataatagtatatatagtaaggtatactatagagggtgataatagttatattaatttaccggtactatctaaggataccttaggtatacactatatagtaagaattaataaaataacttacctcctagtattataataagataataaaggtattatattataaagatattatagattatcttagatttacctcctaaaagggtataaaagtatatctaatttcgacccttaataaaatataacttacttcttaattttatctgctttatatataacgtctttccttcctatttaggataagtataacctattaactatatcttatataatcctattatataagattatataagataacttcctaaaacggttatagtctatactagactataatatcctatctgctaaattgctcacaatatagggctaatttactagggttattagaatataatataggtgaattataggaggtaatttagttatagtaaaaatataaaattaataatattagaaagagcatttaattcttagtatactagtattttttatagagtaattaatactattttaatagagaaatagaggtttaaaaagtagctatagaagtgggagaggtacagatttattaatagggggtagccttacaccccgtatcgactatcaattctaccgcactagcacccctaaaagtgtagttttcgagtatctaaaaggtatatattaatcgtagagggctaattcgtataaattagctatttccgaccgagaaatagcttgatttaatagtgtaaataggataagaaaatattagtttatagggtaagtgaaaaaggcggtaaggggtttatagagtttttatcctactataatagatctctataataaatctcactagtttataacactttataaatcataaagcttactagtttataacactttataaatcataaagcttactagtttataacactttataaactataaagttataataaaaagcatatatttttactatataaatcaaaataggctctatttcaccccctccccctcccccttctatatcatatattaatcaccccttcgacttagtgctcgctaactaagcttatctttagtagttatctccccctaagttattttattagtataccgccgcctttcctacctttcccgctccgatctccgcgctactactgtgacctgccagttcttcacaggaaaagagtgcatttgaattcagaatactaagtacagagagggaaagagaaagaggaaaggatcgtcagctacaggatcctttctatatgcgcagatctcgagtcggagacatccagcagaaaaccctatcgacttcaaccctaagccctgatctgtcctgtcacatatctaaaacaaatatcatcacgtgactatacagtcgaatatccagataacatctagatcgtcatataacccccggctaaaactacattcagtctctaaatgctagtttatcgttattaatatatttatcgagtataatatcactcttcgaagtatcaatctagtcttataaacgcattaggggacctagtttagaaggatactagtcatagaattcttaaaccttctatggtatatacttaaagtttcctacgggatactattatagattaagatcatatcctaactactacactcgatactataactttcggtaatatattcttatatctagcaatttatcgacttcctatttatcttctttattaactctaattagcggagggggattaatatactatcctattaaaggcttagtagtcgctacttttcgtagcttactagtatagaaaactaggtatatctagatcgaatccggtagattaagtttataagagttaccgatcttactaataatcttatatagcccactcgctaagtaagcgagcttccgacctagctagataagctactgtctttcgttattataaaaacgaagttattaataccgaaatcttcctctctccgatatcgatctacctaacggatttataactattataactttataatctactcctttatctagttctagatttcttataggtctaaaagtatctatatagcgtcttatttatttagtgttactatttcctagtctttctaatcgaaagatatagccggtttatatcctctctcgataaagaacggggacttctttatagtatcttaaggaaggatagaagctacaaaatctactattagtagtatttctaactaattatcctagttctatttaatatatagtcgtagcctctaggctatatactaattcgcgatctcactctaactatcggtttaaagatagtatatagttaataacttcctcttaatcctaaggattcgatagaacttagtctagaacttaaaaacgaactagcctccgcggttagagataatagtctttaggataccggtagtttatattatattatcgataaataactaagctatctactttatatttatatctttatagtagggaatagaaattagtctcttactaaagcggttaactactataaagatagtattatacctatatcggtccttcgggaataagcggaaatctattaaaatatattactaaggtctctctaggatagagagggggtatagtagtctagggacccgatccctctatactttagtttatttatagactaagtagttatctatatatcgcttaatatctactatctatctaggctaatagtatcttatagagataagcttctttagcttttctatactaggatatatagttattagttactagtgtaccttattaagtagtctagtatatagattatctttatccggaacttctaggcgttctttatagaggagaagtccgtctcggaggatctatttcgggttactcccttttactataatctatcggaacttattaagctctaaactctcccggtttacctattttaccctattaataacttcttatacgttctctagttagattaggtttagatctagcggataaactctcttctctagatagtcctctagtaagagcgttagctacctactattatcgatataaggtgactcctttcttaataatatatctactataatattcttcttctctagtcggtatttaattaagaaatagaattataagaggaactcgctctacctcgcttatcgttagtttatttatcgagtggttataaagtattctagagattgatagtctataagaatctcgaaacgatcttattatacgaggccctcgagctctagtctctattcctataatacacgtataatagtaagaagttccttatcccgcactttatagtttaactctatagcttatatagtttttaaataaaaagctactagatactagaaatcgttatctttatagtactaagataatactactcctaacacactatctaaagtattagtttccactcttatttttcgtactaggtcgtaataatagagtatcggtatagtgactagcttctcctttaagagcgtgaaggctactttataataggtagactatttatataggacgtcctatcgagttaggcgatatagaggcttcgaaattaaactatatccctagataaatcgtcgatagaagttatagaatctaaggaaggattatacgcctttcactatcgatagggtcttctataactagattacctagatcttcttaggattaaccgcgatactatctatacttataataaacctaaggaacttagtctttataatagtaaattcacactttaagagaataacttataaactagccttctataaataggaaagcacctctcttacctatcgttaatattctttaagagtctcactatagataaggatattatctataaaggtaactacgtatttatctatatattcttataagatattatttataaaccgctagaatatagccggtctatttattaacccgaatagtattaccttatacttaagggatctatattatatcctaaaggttattaagtcctccgctcctagggttaaacgaatccggtagaatccctatctaatattaagcttagtaaagtactttactttactagttcgttaaagcactttgtcgattagaggaagtaggtaatagtcctttttagtaattatatttagctttcggaagttaatatagaagcggagtctactactaggcttctttactattaggattagggatatataaggggacgcgcttagtataataaagcccttatctagattcttaataatatactattttaccgcctttagcttattaagagatagtttataaaggggatagtaatctagttacacttcggctttgagaataatattataatctataccgggtctatataggggtaatttatctaacttcttcttcgagaacacttcggctagattatgatactctagtagtaatatcttcttaatctctcggagtttaaggtcctcctcgatagaagactttatagtaagaattcgatctatctcactaaataaggtagtaaagatctcgattcctcctatagggtttctcttcttctatacttcctatctatcgaatctaactcttctaattacactaatattaattacgggaaagggaggcttatcttcttttttataggagagcggaatatttagtatcttatccttaatattctatactatctttctctactcttatatctactagtatctatactaacgcttataagcgtaaggatagatatcttttttcgacttctacttctacactcctatagttatcttagttagctcgaagagacaatctctttagtctatatctttctagtggatatcgtcctatagagatctctataggatagtcttcggggttaggatagagatcttactcgctactttatcgaagagagttcttttatctagctaaattatccggtattatcggcaatcgagaaggatattatatttagtaaactatattcgcccgagaataatatcgtatcttcctaagtctataattagtatagggatctatcgttaaatctttctatcgatataaattataaggaaggctatatactatattagttctactagtttactattaaaacctcgtactaggtatttatagcctagcctttctactctaagtccgaaacgcttacctagtattataactattaataaattaataaaaatataactatctactctagtatcactaagtgctaaaattaaaaataagcgtttattatatattagttatatattaaaaattaagctatctctaggaccgctaattaacttctataaatctagcgaaaatagtaacactttctatccgcctaggagggagactttacctaggtaggaacttttcccgaatcggtattagctttaagctctataatcttatctatatagggagggtttatagtagaagtagtcgtcgcgatagcgagggtcggtttcttcttcggacaattataggttatatatctatattccttatagttaaagtatcgtccttctcttattaaggtctctctttcggaaatagatagactcggagtgtactcgcgctttatatagggagtgcttaactagttcgcggcggatatacctccggtaccggtagcggggatcgtagatcgggtatataaggaggtctttacttcctactagagactaatcttatacgctatactctaatagctctatataaatatatcgaataagatagtatcttagttaactacctatataacttaactctaaagtaggtataggagtttcgaatatagatcacttatagttttcggtaataataatagcttcttcggcgagctatataaactctataaggaaattagtgaaactatccttcggttttatcttaagcttatagtatatagtataagcttctatatattagtttaggttcgcgaaaatagtctttaggtaaaggataatatctttagcgtctatatacgggatactagtatcggagcttatctagggagtaatatatagctaagctttacctttataataactctagatatagagcttatagtgaataggtaaagggtaatagttagcgtttacctcgagtttctagcgaattatagtttcctaagtcttaaatcggacttcctttctatcgtttagtataggtatattaggtattttagtagacttccgagcggtagcggcctctataatcggtgcgccggtactatactaattctaaccttagagatttaggagacggaaggtaagttcactatattcgcggatagcgatatctctataggcgatagccttatctcgctcgatacggagtgcttctatagtattattaggtttagttctctctactcttagtataataatcttatcttcgagttcctagactagatttcgtagtctctagtgattataagtaagcttaataaatctttcacttcttagtgtctagcgtaaccgtacgctaatcggttcttcttctttatcacgttcactagtattaactagtctctatagattgggggtcggggtatataggttataagtagcgatagtttcttacttagtctctttattaggtacggggataggctatctatcccgatttataggtaggtttcgtctcggaccgactatcttgattagttagtggttctcggtataggtccgggatcaatataggttaaggtcttagctatacggtgctaaggaacgaaagtggggatatgatagggccgaaaccaatcaaattgatagtttatatagccgtactattataaagaaattgagatagtacttagtattatatgacctactagttctgttgacatgcatggtatggtatgtctttatgcctttgtccctttgtgcagactgagcctttgctatgtcagcttgatatgtcagtttgtcagtttgccattcctttgttagtacaggcttcatatacagcctgtttttccatagattcatagtacgcatcttcttcccgattttccctccatgctagtttatctcactagcagtcctccttcgtagcctcatcaggttatgacgccctccattttcccctttgctttatcaaagatctagtagatctatcctgactttacaagagcaactccccgcgggggagcctcactattaagaatagcactgtcgataggctatttcttgcttgttttattaagagagtagctttgagggctatatctcttactttcttgttgcatataccctttgacataaaggggtgcacttttgatttgcatataccctttgacaaagaggggtgcatttttaacttctttatcacttttgacaaagggagtatctcaacggagtactatctctttatccttaacaaagaagctttgttgtagtgtctcacgttgagaactgcatttattttcatcagctaagatggctgaatcctctaaccaacctgctgcaaaccgagactggtatgccaagtaggatgatattgttgtagactaagctgttggtctaccggaagtagggagtttcaacctctataaaattacaccgccgctgaaagaacgaaccgattttgacaactgggtggactaagtggaaaaaatcctacggagctatcaacttcacaatctgattaacaccgatatcctatggcccgttgtcgacgatccaaatggaaagaaatggcatactctctccctacaagtgaggacatggatgacgagcagtatggaccacaccctggtttaggaaatcaatgctcgtggatcaaaaattggtttcgccgacgacttccttgccgaattgaagaagcatacgaagggagaaggtcatggtgctttgaaagtagctgtgagaagtttcaaaaagctctcccggagccaatttacgataaatgaggacttcatttatgctgtgaagcttcgttataaagctgtctgtgacctcaatggagaacttcctccatactacgctctggaaaccatgttatcagagcttagtgatgtgctagagctgagcggttttatcgttgtaaaagacaacgagcttaacgctattgagaaaccggcgaagacaattactattatcgatttttatcggtatagtactgctattctagattatgttaaatctagcaatacagactctctcgctctctctgctctcaagaagcgtataaccaatctatctggatctctttctacaccggtttctaattcgaacactaacaacaataacactacgcttacaaataagccgctaaagggtgtgtcggcggaggagtatgtgaggaagtggctggcgcacaaaccggagagaagtgacaacggaaattgctcttactacggcaaaagacacggagtgagcagatgtttctatctatgtcctgaacttcgttatctaggttggattctatcgctaggattatggatttataacctaaagaaaccgataaatacggcaaatacggcatctaacggcactgagttcaaataagacaaaattcagcctatatacggatcctaaacagataggacccgccaggcgaatctctctgcgccagatgccggatctgggtttatcatgacatctatcaatgttaatttctgcaaagaaggtttcaatccttcttatgtgatgacagagagctgctataaagatagcagttctgataagaatgtgatcgtagagagccggtacggtgagaaggttatggcagagactgctgtccgggaggatgacgtaggcatggaccttactgattccctccaaaaagaagggaaagaggttatctagcaatctagagctggagactaacaagagtaaggtcatgctcttattgcaatccagctatctgctacagctctaggttatctatgggttttagatactggcgcttcggagtatatttgtagtgacgaaactgcgttttctactatgtaggcctatacagctggctaggaatataaatggtggacttccggtaatgaaaaagtcaaagcagacgtatatagcattgtcaatttgacacttcacattggaaccgaagatattgtgtatgtagcttaggaagtagctatccggatatcactagcttgctattaaattagtattcactgtgtttataagaagggtggataatataatctgttttcacttaggactgccgaaaaatagctgggaatctggtggaatagtaagactggagctttatatgatgaatacgacaagcttataggctatactagaatgcaccaacgagtcctattcttataactcgcttccctagctctcggtgtagcagtcatttctgtagagcttgcacaccggagactaggttatgctagtagtcatgctacaaaaatcaaccatgcagatctaggttgtgatatgtaagaagatgacgctggtttcaactgtgaagcttgcaaactcggcaaatcaaagcggattgtatctcgcgcctagcaagcgagagcaaccagagtaggctatatgtttcatatagatctatagcctgtatccctacctggttttaatctagattctaaatccaatgctagcaaatatgatagaaactatatcatgatcattacagacgatataataagatatcgtcttataccatatctcgctaccaaagcggatgcttctccagttctctagaaatttgccgaagaaatgcgccagaaaatgggatgctggccgtaggaatagagaattgatggcggcacggaattctctgtttttgctaaatgggccaaatcaatgtatataacagtcactttgtcagctccctatgtatatgagcaaaacggtgtttccgagttctctgggttttatcttttatagattgctcggactatgagaattgatgctggcgtaccacaagaactctagctagaagctatcaatatagctacatatatcatcaatcgactaagaaagccaatttcaaaaaatggagctcagggacatgagtatgaagcttagggagatcagtttcactaagctcctatcatggcatggaggaagtcattgaatataagaagtcctgacaatgtctccctctccttcctccgggtatagtatataaaggcatatgttcatatcccgaaggaaaagcgtgttcaaagtcagaaaatggaagctagagcgtggattggctacctcgttggatacgagggtgacaatagttatatctataggatttatgatcctaaaactaaaaaggtttccagacaccgggatgttgtcttctaggagcaaaaatagggtattcctcactataataaaagagatattatcactagaggacaaaccattgatacacctccccccatttctcagaggggtgttagttcgccagtcattactgctagcaaggtttaacaactagttcatctcccgccattggattcacgtgtggaagaaatcgaatacgaagaaaatactctctttataacccctatataagcggagaaaggtaagagatctgcttctagaagacctctaatgataggtttgtggaccccttcactaagcgcaaggaccgcctcgagaccggatatagactcttcttctccggatccaattacagctactctaacaccgcagccaaggatattaagacgccaaactacgggaattccaccgagaagatttgatgaagaacagtgggacttatatggaggaagagctctatctgctattggtattgttctcgtagcgacgaaaattccggaaggtttaaaaacctggtagattaagattccccgcaactaccgagaagcaataaactcaccggaaaaagagctttagtaggaagtaatggacaactagatcaataagttggaagctgtataggcttaccaattggttaataccccgccaaaaggcagcactatcttactaggaaagtgggttttcgatcttaaatgtgataaggaggattttatcacagaaatgagagcaagatgggtgatctgtggaaaccgctaaagacctagattcgattttgacgaaacctatataccggttgcgagacccgaaagcaccagactttttctatctatggttgctatccgaaacatgcattgggagcaaattgactataccactgcatatcttaatgcacttattgatgagagatacatttttatgagaccactaaccggatactacactccttcttcgacgtctgaatctagcaaatctttccggctggaccaatcagaagctagcaaagtctgtatgctaaagcaagcattgtacggacttcgacaatctgtaaatctgtggtacgaaacgctgaaggaagagcttaaaagactgggtttcgaagagcttccggatgaaaggtgtattttcacctatagagagagagatctctggcttttgctctatgttgacgacatattgagcgctgctttggataaacgacagatctaatggttcaaagacaacattacctttaagatcaaggtggttggtgaactagctagatttctaggaagtagcttaacaagaactgctaacgaagctttatcaaccatttttgtcgaccaagctgcatacctggaagatctgctacagatagcgagtctaggcaaggttttatcaatatacctgcctatgaagtcatcctatcaaccacctttctctacaatagagactgacgtagtctcttcctcggaaatagtctcttcctccgaaaaagcagcttttggagaagatgttggcaaggttgcctggctaggcatgcgcacaagacccgacatcgcctttgctataaacagactgtagagaagaactgtaaatcctaggaagcaagaccttgatgctctttcccagttactgcgctatttgaaaggcgcactaagctatgggatacaacttgcaaagaccaattcgacactaattggttatgtcgactcttcatttaacgactgcgaagatgggaaatccaccgaagcatatgtcttttactatgctggaacgccaatttcatggagctcacggaaataagacattgttgccacaggaagcactattgctgaatatattgctctcgatggagcagtgagagaaggtctttatttgaaaaagatccttatccagctgcgtttactggatgacacgaagccaactccgattccaattccaatttgtacggatagcgacaatgccgttgccattctcaaaaaggattcttacaacaaggggaccaagtggttagatgtcaaataccaatttgtgaaacatgctatgaagacgaagcagatcgacatccagctcatcgacagcaaggaaaacccggcagatgcattaacaaaagcactgccaaaggtcgacttcgaaaggattcgaaaactgctggtgagcaagaaggattgatgatttttactgcgtctttctctatactttttactgcaatttttactatgcgaaccagattgattttggcttttgatgctcagtctgggggggtgtgttgacatgcatggtatggtatgtctttatgcctttgtccctttgtgcagactgagcctttgctatgtcagcttgatatgtcagtttgtcagtttgccattcctttgttagtacaggcttcatatacagcctgtttttccatagattcatagtacgcatcttcttcccgattttccctccatgctagtttatctcactagcagtcctccttcgtagcctcatcaagttctttataggaaaagagtgcatttgaattcagaatactaagtatagagagggaaagagaaagaggaaaggatcgttagctataggatcctttctatatgcgcagatctcgagtcggagacatccagcagaaaaccctgtcgacttcaaccctgagccctgatctgtcctgtcacatgtctaaaacaaacatcatcacgtgactgtgcagtcgaacatccagataacatccagatcgtcacaactactaccttaactccccgatatatctcgatactaattagatcccggcgagttaaacgttataatactaatacggttagatggctacgctagcgtataacctctaggtccttaattcgtatatagatagagactagttaatagatatccggggtgttaaggtgctaataggggtagaaatccgctagggagaggctttatcccctctcctatacctagtaaatagtatacccataaggtaaacctctacctactatagtgcctatataagtaggtagaaatactatattatctaatctataatactttatatagatctctatagcgcggttaattacttcctaggaaatgatatatttaataccctaaaaaatagggataggcgttaattgaaactaagtttttttatctttaataccctagagagtatttatatttaactatataaccgtcgtaccgaagatagatactagggttaagaaatcataccttactatctatatatttatctttaacctatagtgtacacccttaacgcgggaggtagtggtttcgttaaggtagaagtagtgctttatataataccggagaaaggcctttaagtagctaaaaacctcggaaatccactcgctttttaagtatctagatataaactattagtttattagaaataagggttaaaataagggttaaaataggggttaaagtataggggtaaaatatagggttttacttaataaatatatcaaaagggagacactgctagcacaccgaggtttactccggacacaccactagtaccatttcgggatagtcactcttagcagtcaggtttcaatacgagtgccatttattatagtattgccttagtaaaaaacacagcccccgaacatctccagccacagagtacatatacggtcggtctgatctttcccccccttttatctgattataaagctccccgtaaatcacgtgatctggatagggcttgtttgctagggtttgccgagtccccgcacaaatattctggtctcctatagtaaaagctgcactttcacctgcacttttacaaccccttttcattagtttgaacactatttttatcagtttaaaaatgcactttgattttgactttcatttattttaaatacaggcaaaaatgcaggcaaaaatgcagacaaaaatgcagacaaaaatgaagcttttactataggaaaccagaatgcaaattaacattgatatacagatttttcatttgtatacggactcggttaaccctagcaaacaagccctatccagatcacgtgatttacggggtgctttataatcagataaaaaggggtgggggcgcgggtaaagatcagaccgaccgcagaagtactctgtggctggagatattcgggggctatgttttttactaaggtaataccataataaatggcactcgtattaaaaattgactactaagagtgactatcccgaaatggtactagtggtatatccggagtaaatatcggtgtgctagcagtatctcccatatcaaaaatagggttatagtagttatcctagaatttatcctatatatcgtctatatcgttatatatagagactagccgattccactttacttttataatatcctattatttattaatctcggcctagaaggctttacccttcggtattctaatatagcgcttaacgtagttatagatagctagctttatatatttctcgacgttattaaggatatactagaggtagattatagtattcgtactcggaaaaacctagtaaaaatagtaattagtacgatactaactaactagtaggaatagggatagataaatcacctagttaagcgctttaataagtgcttactctttatccgtaataatagttagtagactaaggtaaggctactactctatagtaactagcgtactagtaggatctaaattagggggtaaggtattagggggtaaggtaggcttaattactaatccttctacaataggattagatcctagatagaaggattagtatacctcctttaagtagtaaagtacactagtgtaaacttccgcctactccctatttataaaggtaatactagtattaaagcttttattagtaatagataccctaataatattaaagagaggtatatagaatagattagacttatatatatatatagtctatctataggatatatagataggcccgaagtaatactaagctacttttatatattaaaaatagtatactaagtctcttagatttatcgatagtataccgtataaactagctactatcctatagtagttaattaagtaatacctatatcgtagttatagagctaagcctctctttattctagcgctactttatattctctagatcctttactataatatagcttatagctttatttatatagtaggagtcgaggataaagcggtttagaaggaatttctctactatattaattatatctaaccggctctatcttatctcccgctagcgatacgtagtgtacgctaatagaggtacacctaggtagttataactagaataagttatagttatagtataggaaccggtaataggattataatatagtaaacctagatataagaattgctttaactagataattaataaatatagagtagcgatatagcttcttacctaaaaaggggcaccctatcctatagtatatagtcttacgtatcttcttaatacgccgatccttatattttaagctccgttaacactaaaattgtatagtaaggacgataccctacgtattcttatataaggatttctttaacactatatacccctatattactacctagttattaatagagtcgatagcttcttatatatccctaaataacgtatttactagaggtagaagtatagactaggggcctatatactcgctcggaggattaggattaggggtatactcgctcggaggattaggggtatactctattaaagatatcttaaatagataaattatagtcaaaaatgtagttaaaaaagaagttaggaatatagtcaaaaatatagtcaaaaaagaagttagaaatatagtcaaaaatacagtcgtaaataaagctattcacaacggggatagatagatttactaatataattattactatagggtactctaataaccctagtaaattagccctatacagattatatgatttaatagaggtatagattagattaatttaattaatttcattaaagtactatatagctaaggtagctagggtactatattttttactatagtagtactataataaatagcactagtattaaaaattggaagctaagagagacaaatcctaattaggactaacccctatagttgtagggaaaccgctataatagtagggtcttcccgctactaatagagtacttactatagagccgttataaaaatagatagctagtagactttctaaaggagaatctagactatctagtaaagggacggacggtctttagtaaagaaggactctttaggagagagatagcgctcggtattagcgaaggtataactaagaagcgctcctatagcctaggagtaggatctttttctacctattattatataagctcctctccttttttatatactagactttcggtctacctatactattaaataagctcctcgtttatcctattaactaggctatcaattagatcttactctctctaaataatcggtttaggcttattttatataattagtatagcgcctacttagcgtatagccttttcgagctctctattaagcttatcttctttaataaccttagtaatctatctttattagatctttagaggctctattagatactttttataattaagacttttattaaaagttatatcttaaataaatttataactattagtatagaggaactagatcttctaaatattactcgctttataactaactagatatccgatttctactctatagtatattttatctagggtgttgatatatttgccccccctttggctattcctgccccccccccctgcctgattctgcctgattttctggcagaattcttttctgccaggtaaatctctacttttggaatattgatttacatggtaaaaaaatgtatgtttatgataagaaaaaaatgcttattcctgcataactgaagcttttattcgtatataacccccctattttgcttagtctgtatcaaatctccgtagcggctcgggccttagcctcagcctaagcaccttagcgcctcgaccacaagatattcctacaccacgaccacgagttgttcctacgccatgacctcgagttataagaccagggcgctaagtagtaccgcgactcctcgcccctcggcctctacccctaggttcttatgacagtgcgtattcgaacgaggataggtctcggtgaacggatcggtcgtaggcggtaagtaatattaatattaattttaatttttataaatctttactttttataaagggtacttatttttgttaggggtttatatagtaaatggaggtaccactaggagtgctatacttgaccagagaaagcggtgattcaaaaaggaaggcggtgagaagggcggtcagcagatgcctgaatatcaaggcagggggggcaggaatagccaaagggggggcaaatatatcaataccctttatctaattaagggatcctttagatctttatataggcttagtagctatataccctaagatttaaaaggttaataggagtaaaggtatctattccttataagtagaattcctattataggataatctacttccccgaatttagctttatcggcgatctatttaatatatatatagtagcctatactacttctagctagaggttctttaaaagggctaaatctttaaaaagcgctcttactctaataataattacccctctagatcgctttataaagccgttttactctagggtaccgataactattatctatattataattttattctttttaaaaaaagtgatagtcttactatctatcgaatctttattatctaaatagaagatataaattagaaggttaaactagtaataaggtaagcagaggaaagtatagatagcttattagtagccgcttttctatttatatatctctctttagtaatagcgaatcctatttagatagaaataagaaagctagatataattattataccctaatttaaatataattagattaaaataaatataactaaatagtctaaaagaggtcctttatactttatataagatttactactattatctatttagctaataggttttatagaggttaggattataagattcggtatctatagttagagaggaatccttaataatttctatcctatcgactatagttataagctttttaacacgcttactataaagataactaaagcgctagtgctaataaatagtagaagctttagaagtaaggggctatattatacgtcttattatattaaaagtagtagttataaatactactagaaatataaaatctacttatagaagtgtaaagaagtttctaatctcttctagtttatagaatattttactaatatttttattaataatagtaagtttatcgaaattagctttatatccgttcttctttattagtataaccgaaattagattataataaaaaccggaggaatactctacttctaaaagagtaagattaataggctttctaaagcgtccgatagtcctaagttagaccttactagttctatagagctatataataacgtatttcataagcgagctgcgcacacaagcgagctacgcagcccaaccaatatgccaatttcaaatccatttatttcaaccaaaacgctagtaaattaaatttttaaaaaaacattatctatctggatatgtctctctcctatatcctagcttcctatatactccgcacccccggggggttttgtacgcggttgtaaagctaattcactatactaaccgggaccgggtttagctgcttccaccggctatataattagcgtagatacttcttacactaagagaccgctctctacgtatagatacttcctagatctagcacgcttttacttcttcttctcgttttcaccgcgtaaatcactcacttctctctctagaagtgtagcggattatatcgttatttaataggcttttaaaacctaatttatagcggaatttagcggacttaggggggtttttaatctagtacgaagtaatactttaatagaggaagcttacttttctaattgcctatagtttaaaggtgtttttagatcctaatcactaccctagctagggggggaggtaggggttcgaagccgaatatctagcttcgaaatcaccctatctagtttaaaggggactaaaccggtagattagaagctatttttaatagtctctaatttaaaagcttctatctatatagtaggataagcttcgaggaaatctaatttatctatataattagatccgcactgtatccggaattcaactagtctcctataagcccgttttaatatagtaaaatagcctatatctagaggttataaaagataggataaatacgggggtatatagattagtataacccggttttttttatagattttattaaacctcggtattaaatagcttctatagctatctagtattaaaagccgatataccccctttatatatatagtactagggataaatagctttttaagctagcgaagtctaattttattagtagtctagccgttaggactaacttcgaaacgctagtcggaaggaagactatcgaactaagatttaataaagaccttacctttaaaaattaagtatagtagaagggcccgatacgcagcggtataacggccagggttcaaaactctttttactaggggatcttgatgcctggatgccttaatgagtaccgccttttacaccgctctatacaatgtattgtaaacattcatataaacatgaagccttttgctcccatacaaatccatgcatctccatttttggggaggtttaccctctccagcatgaaaatgaagcctttttctcccatacaaatgcatgcatctcccatttttgggatggtttactctctctctctctctctccagtatgaaaatgaagcttttttcccccatacaaatccatgcatctcccatttttgggatggtttaccgactctctctctccggcgcggaataactagtcccgatcgattactagtctatattaaaacttcccattttgcaagctgtcatcccacaaatgtttattccctatacactactccatatatgaactatgccgcgcccgcgtattgatctagagccctataaagaagagatactcgatctcattagccagaacaccacatatgcagacatccgcgctatcctcgaagaacgatacaacatcgtaattagtcgtagtaccctacagagatctcttggttactggaaaccgcctatacgccatgatcttactcttacccctagggtagagatttaagatcgtgttgaagcacttgtatctcggtttaacacaagcgaaattcttcgaattctcgccgtagacggcagaccttcatcggagaggactatcagaaggattcgagcggaccttaatattaagcttcgtctctcccctgattagcgatagtaacaatttgacgatctccaagccattcttatctgtgagaatattattggtgaggttgaggactttggctaccgtactctatatcgctatattcgttctatggggctattttatacagagtaagtgctctactctaattctctatactccaattctctatactccaattctctatcctatactaacctactttagggcccaaattgagcttgcgtagcgtctccttcggccttaagatgtacaaagccggcttctaggttcacggcgcgaacggataaactatatgtccctaggaccaaacgatgtatggcatattgacggacatatgaagctcgaacctttcggtattgagatctatgccacaattgacggatactctcgttacattgtctggatatacgttggtataaccgctcgcactgcggttagcgttttacgctaagccactaatgctttctaagaaagagggtttcaaccaaggaaattccgatctgatcgaggtgtagagactgttcttttagctgatagccactatgagcttcgtcgctaagctgatccctctgtcaaacctaaagactgctggatatatggaagaagtgttaataactagcgtattgaggtatggtgggggatgttatcaagggcaaccactgggctcttctatgtaagtgcactataacttaatatttaatttgattctatactaatttaaaagaagcgcttttttcgccgcctagcacacgaaaactgctttataaaagatagtattcctgattaagtatctcttcttgcagtctatatagaaactatacggaagcgagttaaatcatacaccgagaattggaatacccaccctatccagctctatgctcgccaagaatatctagtcctaggaaagccagcaatgaactttcacttaccgaaaggggatgcgaaggacttcaagtgtgagattgactaagatctagtatcagaccaagcacagctcttaaaaaggctttaagatgatatataggaatgggatcctaatgaataccttccaccgcccacatttgtatggtgtcactagcagctggttgaaattggagaagagcttatagggataccgtttgaccctataaatccggatcttcggtttactagtgactctaagtctctatttgaagcggtgtatatgaagctacgggagcgagcatataggcattgggcctcgggctaagatccgatactcgacgtttgtataaagccaataggtgcagctaagtgggatcctaataaggagcatgcagtggatgaattgggagagaatgtctcggagatatttgatgaagaggagtattaggagtatgtctcggaagggtagaaaatgtatttaatattacaaattagcctagtatatgaatctatctatagatgtctcggttaaaaatatcgttaaaattaaaatactatctaaattaaagcattctctatctaggttcttttatctatcaagttcttctatatttttattcatctacacatttgatatactctctaccaatatgtatttgtcagatgcagcacaagaggcttttaggaccctcttacgggagttcgactctacaactcctacacctacttccttagtagcacctataacgccggcaataccttcgtcagcaataccttcgtcagcggggccttcgtcagcggggccttcacctacacgagcccagtacacaagcactcggttcgctgacctccggagcaatacagttagcggaaaccgccttgcttatactaagaagtttaaggaggcagaggaagctcggaaagccgctgaagaggcgagtaaacaaatcactatgatagtgattttctatctctaggagaaaccaggagagacaaatccaattccggatggtatgtatttcctatataatctagaagcaaaagctaattattacttttatagcttcagtttccgttaaccttcgtcctaaacaaacggtcttgaatatcgacagctttacgagggattactttattacagcgctaccgagtatcgttgatttcagtctagggtggacggacaaatgctactttgctgaggagatgcagtacgcgaaggggaaatatagtcctcgatggatatcgggagtggatgattcctttgacggtactgtgaaggagcttgttgataggcttccaggtcggaaggcgaagctccatgtggttgtgaagcggtataaagatacgtattcattcgaggctgatctatgggaggatgaggcccctttccatgtaactacaccaagtccagcaccagtggacgcagagccagtggacgcagagccagtgagagcagagccagtgagagcagagccagtgagagcagagccagtgagagcagagccggtgaggcggaagcgggctagatctccggttacaacacctcggcggagccatcggagacggagggttagatagatatatggatttgtaagtaggaattaaaaaaaaaagcttcattttcatgctggagagggtaaacctctccaaaagtgggagatatatgcatttgtatgggagaaaaaggcttcattttcatatatggagagagtaaaccatcccaaaaatgggagatgcatggatttgtatgggagcaaaaggcttcattttcatatatggagagggtaaaccatcccaaaaatggagatgtatggatttgtatgggagaaaaaggcttcattttcatgctggagagggtaaacctccccaaaaatggagatgtatggatttgtatgggagcaaaaggcttcattttataataaccctataacgtcagcagaaacagcgtactttgcttattaaggcatatgtaatagtaattcaggtatcttaatttttctgccgtttcaaagtgaggcattcaggcatcaacacccccaaaaagcgagttttgaaccctggccgttataccgctgcgtaggcccgactagtagtatttgtacacttaataactatcacctatttacgatttctaggttataaaagtgctctccgactatagtattcgcttctcgtaatcaccctcgctatcgctattaatcctatcgcgaaactagtcttattaaagttataaacgtcgtccgggtcgatcctaaattataagatagttttttaaactagattaaaccacccctttataacctccggatccttatatttcgcacgtttatagttataccgtttcgaaaactaagaggatagaagagagcgtctttttatatagttcgttacctaattttcgccgaccgaaagaaccggggtagtaccgcgcttttcgaggagaagattcgctatttctcgcactatagacggccggggagctaatccccgggaatctatagagagaatctatttttaaagagtttcctctttaatttctattagtttatacgaatttatacgagaattcgcgcgaaacgtagtcctataaagacgcgaccggagggttgatttaggcacttcgaatcggcgtgctactctacgaatagcgctaatttcttgatttttaatagctttaatagctaataagatcctaccctctctctctattaaatttctagaggattaggagcggtttggtggtatagtgggtggttgaattaactaagtgctaattcatagacgcgtttttggtggggtgcgcagctcgcttgtgtgcgcagctcgcttgtgaaatacgttagtagggaaacactattgttactcccgtttcactattattacgccactagtaccacttacggaatggtcactcttagtagtcagttttcaatataagtgccatttattatagtattgccttagtaaaaaacatagcccccgaacatctctagccatagagtacttctacggtcggtctaatctttaccccctacccctttttatctgattataaagctccccgtaaatcacgtgatctagataaggcttgtttgctagggtttaccgagtccccctacaaacattctggtctcctatagtcactttcacctacacttttatatgcacttttataaccccctttctatcacttttacacccccttttttatcaattttcatctatttaactatcctgattggtattatatcaattaagaaatgcactttgatttaatttttaattagtgtgaaaaatcgataacaaatagataaaaatagatgaaaatagataaaaatagataaaaatggatgaaaatggatgaaaatggatgaaaatggatgaaaatggatgaaaatggatgaaaatggatgaaaatggataaaaatggataaaaattgataaaaattgataaaaaagggggttntnnnagtgtaggtgaaagtgcagcttttactataggagactagaatgtttgtagggggactcggctaaccctagcaaacaaaccctatctagattatataacttatggggtgctttataatcagataaaaaggggtaggggcgcgggtaaagattagaccgaccgtagaagtactctatagctagatatatttaggggctatatgttttactaaggcaatactataataaatagcacttatattaaaaactgactgctaagagtgacctatccaaattgggtactagtggcgtaacaatagtgaagcgggagtaataatagtgtttccctaatagtattacttacttttagagtcccctctatctctttaaactcgataaaaagacttttattattagagatatacttattagttactaaagggaagcgctattagtaatagagttaacctactagtaatagactagtgcccctttcggaaaggtcgctcttagtagttagtttttaatataagtgctatttatgatagtattaccttagtaaaagatatagcccccgaatatctctagctatagagtatatctacggtcggtctgatctttatataccccccccccctttttatctgattataaagctccctataaatcacgtgatctagatagggtttgtttactagggtttgccgagtccccctataaatattctagtctcctatagtaaaacctacacttttatctacacttttataacccccttttttattaattttatcaattttacacctatttctatctatttttatcggtttaaaaacgcactttgatttttactttaaattagttttaaatataggcaaaaataaagcttttactataggaaactagaatataaattaatattaacatttatatatagattttttatttatgtacggactcggttaaccctagtaaataagccctatatagatcacttgatttatagggagctttataatcggattaaaataatcggataaaaagtggggagggccgatcgtagaagtactctatagctagagatgtttaggggctatgttttttactaaggtaatactattaaaagtagcacttatattaaaaactaactgctaagagtgacctttccgaaaggggcactagtctattactagcaggtaaactctattactaatagcgtttcccttactaaattaactagctatctatctctaatagagctttatatactatttataaggaaagatatattagttagtaataaagatagtgttgaggctacgaaggaggactgctagtgagaactagcatgaaggggaaatcgggaagaagatgatactatgaatctatggaaaaacaggctgtatatgaagcctgtactaacaaaggaatggcaaactgacaaactgacatatcaaactgacaaagcaaaagctcagtctgcacaaagggacaaaggcataaagacataccataccatgcatgtcaacacacccccccagactgagtatcaaaagcaaaaatcaatctggtttgtatagtaaaaatcatagtaaaaatcatagtaaaaatcatcaaattagtctgtcatttccttcttgctcactagtagttttcgaatcctttcgaagtcgacttttggtagtgcttttgttaatgtatctaccgggtttcccttgctgtcgataagctagatatcgatctgcttcgtctttatagtatgtttcacaaattgatatttgatatctaaccacttagttcctttattgtaggagtccttcttaagaattgtaacggtattatcgctatccgtataaattggaattagaattagcttcgtgttatctagtaatcgtagttagagaaggatctttttcaaatagagtccttctcttactactctattaagagcaatgtatttagcaatagtgcttcctatagtaacaatgtcttatttccgtgagctctataaaactagcgctcctatatagtaaaagacgtatacttcggtagatttcctatcttcgcagtcgttaaacgaagagttaatatagctacttagtgttaaattggattttgctagttatatcctatagctaggtgcgccttttagatagcgtagtagttaggaaagggtattaaggtcttactacctaggatttgtagttcttctctatagtctatttatagtaaaagcgatatcgggtcttatacgtatacctaactaggtaaccttactaatatcttctctaaaagctactttttcggaggaagaaactatttccgaggaagagactatattagtctctattatagagaaaggtggttaataggatagctttataggtaggtatattaataaaaccttgcctagactcgctatctatagcagatcttctaggtatatagcttagtcgataaaaatagttaataaagcttcgttagtagttcttattaagctacttcctagaaatctagctagttcactaaccactttaatcttaaatataatattatctttaaactattagatctatcgtttatctaaagtagcgcttaatatatcgttaatatagagtaaaagctagagatctctctctctataggtgaaaatataccttttatccggaagctctttaaaacctagtctttttagctcttcttttagcgtttcgtaccacaaatttgctaattgccgaagtccgtataatacttgctttagtatatagactttactagatcctaattggtctagccggaaaggggattcagatattgaagaaggattaccttagtagtatccggttagcggtcttatagaaatgcacctcttattaataagtgtattaagatatatagtggtatagtcaatttattcctattatatatttcggatagtaactatagataggaaaagtctagtgctttcgggtctcgctaccggtgtataggtttcgttaaaatcgaatcctagtcgctagcggttgctatagataacctatctagctctcatttctataatataatcctccttattatatttgagatcgaaaacctactttcctagtaggatagtgcttcctttcggcgggatatttactaattggtaagcttatatagcttctaacttattaatctagttatctattacttcctactaaagctctttctccggggaatttagcgcttccttatagttacggggaatcttcacttactatatctttagaccttccgggatagtagtaagagtaatactaatagcggataaagctcttctatatatatcctattattatttgtcaaatcttcttagaggaattcctatagtctagcgtcttaacgtccttagctacggtataggagtagatataattagatccggggaagaagagtctatatctagtcttctctctctctctctctctaatagagaagggatagatatagttcgtgcgcttagtgaaagggtctataaacctattattagggtttttctagaagtaggtcccttacctttctccgcttatataggggttataaagagagtattttctttgtcttcgatttcttctatacgtaaatctaatagcgggagataaactagttattaaaccttactagtagtaataactagcgaactaacacccctataggaaatagggatagggggactattgatagtgtttcctcctataataatttccctattattagtgtagaatcccctatttttgttcctaaaagataatatcccggtgtctagaaaccttcttcgttttaggattataaatcctatagatataactattgttaccctcgtatctaacgaggtagccaatctataccctagcttctattttctagctttaaatccgcttttctttcgggatataaatataagcctttatatactatactcgaaggaaggaaagagagacgttctccggggatcttatatttaataatttcctctatactataataggagcttattagtctgatttctttagtcggttaataatatatatagctatattaatagcttctagctagagttcctatagtacgctagtatcaatccttatagtgcgtgcaatctataggatataaaatctagagaactcggaaacactattttgcttatatatatagggagctaataaagtgactattatatttatcggagctaatttagcttatttagtaaaaacagagaattctataccgctatcgatccgctattcctatagctagtatcctatcttttagtatatctcctaagtaatttctagagaactagagaagtatccgctttagtagcgagatatagtgtaagacggtatctagttatatcgtctataataattataatatagtttctattaaatttgctagtattagatttagtatctagattaaatctagggggagatataggctatagattaatataaaatatatagcctactctagttgctctcgcttactaggagcgagatataatcctctttaatttaccgagtttgtatacttcgtagttatatccttcgtcgtcctagtgtatattatagcctaggtccgcttagttaatttttatagtataactactagtataacctagtctctagtgtgctagctctatagaaataactattacaccgagagctagggaagcgagttataaaaataggacttattagtgtattctagtatagctaataagaatattatctttatataattctccggttttgctattctactagattcctagctatttttcggtagtcctaagtgaaaatagattgtactatctacccttcttataaatatagtgaatgctaatttaatagtaagctagtatcgttcggatagctacttcctaagctatatacacaatatcttcggttctaatataaagtgttaaattaataatgctatatacgtctactttaacttttttattaccggaagtctactgtttatattcctagctagctatataggcctatatagtggaaaacgtagtttcgtcactatagagatattccgaagcgctagtatctaaagcctatagataacctagagctatagtagatagctaaatagtaataagagtataaccttagtcttattagtctctagctctagattgctagataacctcttttccttctttttagagggaattagtaaggtctactatacctatattatcctcccggatagtagtctctactataaccctcttactgtaccggctctctacgattatattcttattagaaccgctatctttatagtagctctctattataatataagaaggattgaaaccttctttatagaaattgatattgatagatattataataaacctagatatagatccggtatttagtgtagagagattcgcctagcgggtcctatctatctaggatccgtatataggctgaattttatcttatttggacttagtgctattagataccgaatttgtcgatttcttatagatctataatcctagcgttagaatctagccttagtagcggagattaggatatagatagaaatatttgctcactttatagcgtcttttgctatagtaagtgcaatttctattatcacttttctctagcttatacgctagccacttctttatatactcctccgtagatataccttttagcggcttatttataagcgtagtgttattgttagtagtgttcgaattagtcgccggtatagtaggagatccggatagattaggagatctagatagattggctatacgcttcttaaaagtagagagagcgagagagtttatattgctagatttgatataatctagaattgtagtactataccgataaaaatcgataatagtaattgtctttataggtttcttaatagtattaagctcgttgtcttttataacgataaaaccgcttagttccggtatatcactaagctctaataatatagtttctagagcgtagtatagaggaagttctctattaagatcacaaacagctttataacgaagctttatagtataaataaagtccttatttatcgtaaattggctctaggagagctttttgaaacttcttatagctgcttttaaagcactataaccttcaccctttatatacttcttcaattcggtaagaaagtcgtcggcgaaaccaatttttaatccacgagtattaatttcctaaactagggtgtggtctatactactcgttatctatatcctaacttatagggagagagtatactatttctctctatttagattgttaataaggggctataggatatcggtgttaattagattgtaaagtttatagctctataggaccttttccacttagtctatctagttgtcgaaatcggttcgttcttttagcggtagggtgattttgtagagattgaaactccctacttctagtagactaatagattggtctataacaataatatcttacttagtatactagtctcggtgttagaggtcacgtgacctcctttgctccctcacacattagctagcttctcctcagatagtttcttcccttcttcacgcatctatctattttccagagcacactacctttccctgtagtctgtctctatcactcggtttcctagttagttagaggatttagctatcgtggctgatgaaaaatgaatatagatctcaacgtgagatactataataaagcttctttattaagaataagtgataaagaagtcaaaaatgcacccctctttgttaaagggtatatacaagtcaaaatctttgagaagtgcaatcactatataaaattctcaaagaaaagtgagagaaatactatcgtagtatcctctaaaagttagagatatagcctttaaagctagtctctaaaagtgacgtaagaaatagcctattgatagtgctattcttgatggtgaggctcccccgcggggagatgcttatgtaaagtctttgatatagcaaagatttttatagtaaaggggtaaaacgagggccttataacctgttgaggctacgaaggaggactgctagtgagaactagcatgaaggggaaatcgggaagaagatgatactatgaatctatggaaaaacaggctgtatatgaagcctgtactaacaaaggaatggcaaactgacaaactgatatatcaaactgacaaagcaaaagctcagtctgcacaaagggacaaaggcataaagacataccatactatgcatgtcaacactaatacctaatcttttagctagaatcccgtttttataactactatattataaatccgctactttttaatagcgtaaactagtagtagctcgtttacctttaatcgagcgtccgagaggcgctagatctacccttcctagtcctcttatagttataggttaggggaatcgtcgctattagctattatccgcgggtacactctatatattaagaaatataggcttcttttcgataccgtatattcgcgaatacgtgctataaatactacctaaataaggtacttatcctataagcgtataggcttacctataaggtatttcgtaagtatctgtctaactagcctattaaagttctctaccttaccgttcgtttaggggtaatagggcgttattatataataataggcctagattagctataggaagtgatgtatagcgccggagagaaggtttaggctattatccgagattagctctataaacgcactatagtacgcgtaaatatctcggtataagaactaggctaaggcctcctctatagcgtccggaacggcgtacgctaccggctaccctatagcgtagtcgatcgcggtaataatctagcgattactattagaggtagtcggtaatcgactaattaggtcaattccctaacgcttaaatagccgttcgccctttattactatatactatatagtcttacgctctagactagcgtgtaaaccttaggaaacttagtagtttagatagaagcgtactacttcctcgatatctactcttatagagggctactatctataggggcgaatcaccctatataggctaggaaagcctagatagccgaactcttagtaggagttatagacgagatccttatagaacggagccttaagatatagggatatctctctattatcgtaagcgtaaactagttagcgattaacctccggtaatatatatctattaattagcacgtcctagaaacttaggcgcgcggtaaattcctttatagcctaaacggtcgcgcggttatccgattccgtactatcgtctaaaaaccggatcgttactactaactaatcttccttaaggacgctacgtacggccctcgctatagtaaggcggacgtcctagctagcccggtattagcttatatttataggggtttcgccgattagatctagtcgtcgactaatagtatctataacgatattttctaagcctttccggtagcgtatagctagccgatattcctagaactcggtaatctagcgagctaggcgcttactatactcttttatagtattaagatactataagctagcgttatcggtgataattatagtctcgaaccggttactatcgatatatcgatcctatatacgtgtaagggaatttgggctctggaccaaattctccgccaaggatactctttccgataaacaagcgtttaccaaaaagaccacttatgataaccggatggttatcataccagagtttccactatacccgcaaattggaataccccccgtattttccaattgcgaccgagatgatctactttgtggacttgcatagtttatccattacaattatctccccctttccacgggccacgtcctcgtggactatatatatatagtatacgtttagaggccttaggtatgacgtttaggggccgaaacctattcggggatgatatgccctaagagctcgtatcaaggttatagtgtaagtctcaaaggttggcacctagtgctagtgtgatcatgcctgatttcaggacacgtgaccggactagttataatgctcctttaccaagggagagggtagaaacgacgcagctccgtttcgaacccgggccctcggctatccggttatcataattgtaagggaatttgggctctggaccaaattctccgccaaggatactctttccgataaacaagcgtttaccaaaaagaccacttatgataaccggatggttatcataccagagtttccactatacccgcaaattggaataccccccgtattttccaattgcgaccgagatgatccactttgtggacttgcatggtttatccattacaatacgaatagcctccttaatagctaggagttctttcttatatataggatagttaagctccgccctataaagtttcctactatcgtatacgactaggtagaggattctattatcgtcctcctatataaggacggccccgagggcctattccgatatatcggtttcgattatatatagcttattacaattaggttactttaagataggtacggagactagtaattctttaattctataaaacgcgcttttataggcggtcgtctatataatagggcggaaacgtttcctttatagggaggtatcgctcttctttaatagtttatatagcgggatatagattttcgcgaagtctttaataaaccggcggtagtatatagctaggcctataaactaacgtacgtcgtatatattcttcggcctcggctaggcgtctatagaggcggttttagccgcgagaggataaatatagccgtttccgataacgtatctataaaattctagctcctagatagcgaattagtatttcgctaaagaagcgtatagtttctattccgctagtaaggctaaggcttactctaggtgctagtagtgttcgtctaaggacgccgagaagactagtatatcgttaaggtaaactaccgcgctttagctaaatataggctatagcgtgttattaattatagattagaacgtcgctagcgcgttataaagcctaaacggtatcgtaagctatttatatttaccctatatagtattaaaggccgttttttctatagcgccctcccttatacggatctactagtatcccgcggttaggtcgattttcgataggaatttagcgttactaacgacatctaagagttcctagatctatagtaataggtatctattcttctctataatttagtttagggctcgatagtcgatatatatacgctattttctatttagtttcttagcgaatactattaggaacccttatacgctattcgagtagcgaattaggccctttttaataagctcctcgatctaccgcgcttatttatctagtttctccgctgagagggtataggcgttaatatttatagacttagcgccgcctatatcgatatcgtacgcgatattccgctccggcggtagggctatagggagctctaagcgaaatatatccttatatttctagaggatctcctatatctataggttttcgtgctatagtagttccgactataatatagaggggttttcgggggtagctcgtactataaagagccgcgcctctacgtttcgtttataaaagatatatataatatatcttatagagataaggttagcgtatacgtctccctttataattatatacgagctaacggtagggtatatctcgtatattctatatatatagtccgttaacgatataacggacgtctactaattaatatataggttttcgttatataaaaagtcgcgcctaaagataatatcgtattcggtctctaaaacctacactttaatatagcctatctaccctcctatcctaataggtaggataacgaacccggctatctcgacttatttactattaataatagtaactagtagcgggatcttaagcttacgtacccttactacgctatatagcttctaaacgatatagggcgcgacgaacgtattactcgcgctactattaaagagtatataggcgagaacggggtctatcgccggtatctatatttttccctagtagtacgttagcgaatcacctataacgtttagagaggctaataaatatagcgactttaggcggcgtttatagtactatcgccgcctagttttccttttctattactataggaggactaactctagccggattcgcgcctaatcggtagtatcctagcgcggatctaacggatcctccgcgtctaggggcggaaatttagaagcctcttaaaggcggccgataagggcttctatattatatagccgcactagttttccgccggttatatatagcggtaggataagctcttctacctctttttagtttcttctatcttcggcgcttaatacttccgggtaagataactaaccttcctatagttatagtacgtatacgtctctaggccctactatatagccgcggctataagctctataatatcggggttaggagcggctaccttctatcggtagtttataattatagcgcctaccttataattaataaaaaggagttcgacgttatatatctctatagtttaattcttttctaccgcctactaggcctagaagtctagttttatcctagcgacgaaatagtaaataagtaattattctaggatccctatatttaagtccgcggccgtttactttaacctagatacgtatttagtaatcgatatacgtccttattttatattatcgaacctctcctataggcgtttatagctaatatattctataaactcgcgctaaacctatattttaaacccttcctagctctcgaaaggttctaaacccttaatagcctaggcctatatatagttcttaagccgctcgctagcgtcctttactagtttaccgctagcgtagataacccttactatactaggagttttataacgtaatccactagcgagctggccaccctacaaaaaacgcgtctatgaattagcacttagtcaattcaactatctaccataccaccaattcgctcccaatcctctaaagaatcaactaagcaagagggcaggatcttattagctatcaaagcttttaaaaataaagaaatctcttcaatttgtgaaactacgcgccgtttcaaaatcccccgttcaaccctttcttcacgtcttaccggaatataacaccgcgcgaattatcgcgtaaatttgtgtaaactaatagaaattgaagaagaatctctttaaaaatagattctctctatagattcccggggattagctccccggccgtctatagtacgagaaatagcgaatcttctccttaaaaagcgcggtactaccctagttctttcggtcggcgaaaattaggtgacgaagtatataaaaaggtatcctctcctatcctcccggttttcgaaacggtataactacgagtgtgcgaaatgtgaggatctaaaagttataaaggactagtttaatcttatttaaaaaactatcctataatttgggatctacccggacgacgtttataactttaataagacgggttttgctataggattaatagcgactacgaaggttattacgagaagcgaatactatagtcggcgagcacttttataatctagaaatcgtgaataggtgatagctatcgagtgtacgaatacggctagttaggcccttccactatatctgatttttaaaggtaaagtctttattaaatcttagttcgatagtcttccttccgactagcgtttcgaagttagtcctaatagctagactactaacgaaattggacttcgctagcttaaaaagctctttattccgaccacttttatacggataaagggggtatatcggcttttaatactagatagctatagaagctatttaacaccgaggtttaataaaatttataaaaaaaaccgggttataccaatctatatacccccgtatttatcctatcttttataacctctagatataggctattttgctatattaaaacgggcttataggagactagttgaattccggatacagtacggatctaattatatagataaattggatttccttaaagcttatcctactacacggatagaagcttttaaattagagactattaaaaatagcttctaatctaccggtttaatcccttttaaaccggatagggtgctttcgaagcttgatattcggcttcgaacccctacccccccccccccanccccccctagctagggtagtgattgggatctaaaaacaccttcaaactatatacaattagaaaagtaagcttcctctatcaaagtattgctttatataagattaaaaaatcccctaagcccgctgaattccgctataaattaggttttaaaagcctattaaataacgatacaatccgctacacttctagagagagaagtgagtgatttacgcggtaaaaacgagaagaagaagtaaaagcgtgctagatctaggaagtatctatatatatagagagcggtctctccgtgtaggaagcatctgcgctaattatatagccggtggaagtagctgaacccggtcccggtcagcatagtgaatcaggtttataaccgcgtacaaaacccccccgggggtgcggagtatataggaagctaggatataggagagagacatgtccagatagatgatgttttttcaaaaatttaatttaatggcgttttggttgagataaattgatttgaaattagtatgttagataaagtggctagctcgctagtggattacgttacctagttagagctactagctcgttaaagtaccgattgtagtcgatcgtccacttaagggtagcgttatttaagatagtacctaaatagttttcgatagcgcgtaggttatttagtatagatttcttaacgtccttatctatattactaaagtcgttattatttctatatataaaaacttataaggatatagctatagaatacgccgtagtcgattatagcggtaggactattactaatagtagcgctagtagccgatcggctagaagagaacttagctataagagcttagcctagtacgtttctagcgctcttacttattaagcggctttatatagaactaggtaagcggccttaggcgttatagtctaatatatatataagtatatattcgcctccccggtcgtaagagcgtctagagcctactagacttctataggaagtctcgcacggacttacttagggctcttagtaggaggtttaggggtacttatattattagttactttaaggaattataaaacttatctagtagtgatttatactactattctactataggggagccttccttttaagctaaaggcgcggctctccctagatacggatctattctaacctatctatcgcggacgcgtagggggaatacgagtttacgcggctattcttacgcgttctccctcgctaaatacgagtttacgcggcggtaaaccccttataggcctacccctactaggttacctcttataggtatcccttagtgcgtcgtcactatcccccttcctctagaccgctactccgtgcgttcggagtatatagtcattttcacgaacgctctagataataggtccgctagatcgtgtgtcgggcgcgggtacgggtaagggagtgtggatactcgcgtatagtgttatttacgagggtttacgctattatataggctcacccgtaccgcccttaggcctctatagaaggagcctttaaaccgatatactaccagatgtgattcagaaaggatcgcatagtttttgtattagactagaagtactaaacacctatatacaccctggtacgggggcgtaaaccgtccactatagcaaataccatagtggactaggaccgagtccgtacagtcatgtgatcggtcatgtggcctcacgtgaccgtaagtgagcttacggatctcactagcgcccgcctctagtatctagaactacttatagagatatagttatataaagctctataaggtttaggtcttacaaggctatcaagattaaattagtaaagagaaatactatactttcctaagataggagactagtcttatttatagaggtagaagtgagagtcctttagatatcttataggtactaattagtagattccttattttagaaacgccctcctttatctaaaagtcttttagattactctttaataaccgttaagaagctaattttatactcttactacctattttacccctttattaaaagaccttaagtcttataaaggcctaaaggcctttattaatactattcttagagacttactaagatatttcttttatttatacccctatatatctatactatctttaacggatctaattttatacgtacgcttatttataatatctttctaggatcttaggggagtttttaagcttacttatataaccttcgggaaacggaggaccttttcctattcggtaggggaggatataatcctagaagcctatttccttatataaatatatcttatatcttattagccggatctatatagatccgtttctacacttatatacactatcgttaccgtattccgtagtacttagtcgttagtaaagctaacttaatataaactatgcgatcctttccgaatctcagtagtaaattgattaatttatctatatcagtttttaaattaattaatttactacgtggtagtgtagtaaatcgatactaaagtaaaaagtaggaaaaacgttataaataggtgatctattatatctgggtggcagaccctcgcttacgagggtccgtattttttgttaaaaatagtggggccggttagttaagtttctagaggattaagagcgaattggtggtctagtaggtggttaaagaagaagggctatgttaattgacccgttttttttagtggggtggccactcacttgtgaaatacgttaatacttacaatctactgtccggtacgggcttacaaatggaaattaacgggtgggaattggtatatgaacatggtgaaaatacagggcatggaatattatagacctacctctctactagacgtgcatcgatggattcatctggtgttgaatccttcaatgggaaatgcaaaatcgagacctacccgatcgatcgcgagaggcatgtgaccaagactttaagagttgcactcccatgattcctttgctgacatgatctcaagaatcagaggcgtattcagcaaggcctctttcgctgcttcgtcacctgcagctgctttactcaaaccctgacccgaacccagaaaccttttatcccatccccacccagtgagaaataacgcgacgaagaaagtctgtgtgccacccttctgctgaattgatggacgctcctcaatgtattcaagcttgacatttttccccataatcttcttagcaagagcttccttggagcgtaactcccctttctgatgtcccaagttgtttagaatcggcacccataaacctgatagccaatgctctgccagctcatagccagaaacaggattggatagtatgacagccgcgacgtaggcttcgaatacgtccccctttgtttttgtccatcgctttgacggggtattgtagtttggcggcacggaaaccctgcggtccaaaccaaatctttcagcgaagccggaaagcgtctcattcttaacaaggatctcccgaatctgtgatattcgacctgcaggtaaatctggaaatctctcccagacaagtttggttgcaattagctcgatgtatgcatcgcctaatatctcaagtcggtcgtaggtcgtgttgatattattgctaagagctggatgggtgaagacagcaagttccagcttttcatccatgatcgggggaagcttagggtcacacgaaccactgaccaagttgaaattgtgatctaagtggtgtgattttgggaccccaccagctatggaagcatctctggaagacaactgattcttcgtcgtacgaaatgtgtcatccagcctcgaaacggcatccacaatctccgagtcagcgccaatgagatcagaactggttgaaatttctcgaacaaggtgttgtagaataagcagacgagaattgttgctagatttggccatgccgcgactgacgccaatagaggatttaggatccgatggcccactcgatttttgaacctttaaggaagtagttagcaaattaattgaatcaacaggaatccactcagtgggatgagagcatggtattcaccttgggccgcttttgtgagttttgtgtggcatctgacccaaaggcggatgatgatcttttcagatctaccactggcctttttgagcctgctgaatttggtatctcgtattgagacatgtcaattgttgtagaccttgttcagtcttgagtccagcttttgctgtttttaccctttttctcttgaggtaaaaacatggataaatatgtaggcggtatacttcggatggtcacatgaccatcgggcaaagttcagatgggtatctccccgagttcgatgtctaccaagctgctgtgaacagctgcttcacccatttctttttgcatatgattcttctgaccctttaaggaaggaaaatggcgcccagtcggatcttggatctggttaaggttcaaccacccttttcattgtgctgtgctggcattcactaattggcaattgaattctctagacccaatgccgcatattctctcttaatttcaacccgcaacggcttcggcttggaaacaaggtcttgagacagcgcttgcgtgggccagcgcttgcagcctggtacccaaaacagactgtgtcttttcaggatttacaaaacacttataagcctcttggattgacgacatttgatgaagctgaagatgacagagaagaagctattcagatgtaagaatcgacaccccatgtcacatacattctcactaaacatctgattcatagcgccaaattgcgagggaagggccggccgaagaagaaaagaactgctgcaggtaatctcctctacacccgacggtttcatgccaggatcaaaacctaatacttcaacagaatcgaggtccgcaaagaagaagaaataggttgtctgcctaaccttctaggcatttctgagctcaacactgcaccactcggatcaacgccggcacattctatacccggattatctatccatgatttggctgggctagtgagacactgcgttgaaaaagctgttcagatccttttgttcaggtgcaaattgcctaaacatgttgttgtcttcgctgatagtctcaccatccgacacagcttgttttgtttcatattttgtataatacgttttctttttttttggttcttctcatgcgagcagttcattggaacaataccgaattctacaccaagaattggaccaaacatatatatcaatgtacattgggtaggccgtggcatgagattagcactttccaaggcttccaagccctggatatccctcgtatcttatatattatgtagatgattgtacggagtagagtggcaaaatgtaggcggtaagacattgtacctggatgcacgtgatggcaattgagatgcaatatattcggttttttaaccttgcccgcctacttcatcgtctttcgctacctaaatctatcattgtgcgtacttgaacaaagttttcgttgccagatttctttccatttctgcgatattttccaaccggcaccgcgttcattgagcagctgccaaaccttccagcaaccatgaaattgagcaagaaccagctcagaagagccaaaaaaaaggcccagaaagccgaggtaaggcagattctatggtctctcagtaatagccgatgcaaagctaacactactgtaaagaccacgagctttccagtcgacactaccatgtcacgggaacgttcacctcccacagtcgctacttctcaggatgcaccggctgataccagcactgatctgcttcccgagccaactgatccactatgggaaatgtacaaaggtgttgtcggaaaattcgacgagacagtgagcgagagttcattgacgaaggataccgataaacccgaggtcttctttgacgatggtgatgaaatacccgacgaggagcaagagggcgagcccaagatttcaaaaaagaaacggaaagaaatgaacaagctatccgttgctgaactcaaagcaatggtacgaaagcctgaaatcgttgaatggacagacacatccgctcctgatcctcgactccttgttcacatcaaagctcatcgcaatgtggtcccggtaccctctcactggtcgctcaaacgagaatatctctcatccaaacggggagtggagaaggccccgtttgctctcccaaagtttatacaagagacgggaatatctgaaatgcgcgacgccgctttggagaagcaggaacagtcaagtttgaagcagaagcaacgagaaagagtgcagccaaagatgggaaagctggacattgattatcaaaagctttacgaggcatttttccgcttccaaaccaagccagagttgactcgctacggtgagatctactatgagggcaaagaatacgagaccaatctgaagcacctgcgacctggcgaactgagcgatgagttaagagacgctcttggtatggccccaggagcccctcctccgtggctcgtcaaccagcagcgatacggtcccccttcttcctaccccgcgttgaaagttcccggcctcaatgcgccaccgccccccggcgcgtcgtggggctaccatcctggagggtatggaaaaccacctgtcgatgaacacaaccgcccattattcggaggtgatattttcggtgttttacaacctcaacaacatgcgcagcaaggagtgccgattgaaaaagatctttggggtgaattacatgaatcagaagagtcagaggaggagagtgaagcggaggacgaggacgaggacgaggacgaagaagaaagcggcgaagatggggtgggtgcaggtgctcattctcctagtggcttggaaactccaagtggaatagactcagcagtaccgtctgaatttgttggcgctgagaatgtttctggggagttcgatgtgcgcaaacaccatcgtggtaccgatacagaggaatccgttcaccctcgcagtgcttatcaagtcatccctgagaggcaaacgaacgtggaaggctttttcgggggtgatagggcctacgatcttagcggatcaacaggcaaacctcctgttctcggcgcagatgaccaaaaccggaaacgcaagaagcctggggatgttgaagtgtctgtcaacttggatgcagttcaatccggcgatggcctcagcaaagagagcctccagagcatgtacgagtcacagaggcagcagcagaatccatcaaactgggctttccaggaggacttgagtgacatgcttgcgcaggagaaccgcaaaagattgcgaaaggaagaggagagacggagaaagcattaaagatgcttctttcagtgtacttttttattttctttcgcttgagttctcgaggcgtgcttctttcatggtgagcattggagtttggctgctttggtgtacactctgttcaaaaaaaaaaaggctatctggcctgtaatgtacggttagttttgaatcaaagttcttatgaataatctacgaaattccgggtggtgtgtctgtagattgtctgtggaaatcttcccagtcagcatagcatcttgcccaggtgatatataccttcatacatcgaggcccacagtcacgggcataggttcccgaaaaggtttagctcagtcctctctaccgcatttcgacactacaatttccttgtactttgttgtactttcgccttctctctctaggatacggagaagtagcactgagtaactgtgtgctcctgtgctcggatcctttgccttctattacctcccggagtacttcagccatattatctacgtcagaatggagtgggatcgcagaaggtttgcaggtgcatcgaaacgtctgaaatgaagtttctaagaatttccctagatttgatgaacgaagaggtggagaaagttatcgtccagccgacagaaacggtcgttccccttctcgggcgtatgaaattcgtcaccgccgctcgccgccgcgaacccgaagccctcctcgaccacgagcagacacttgggtaccatcatcaaatagagggtatgggcgcacacgaagtcggtcaccaccataccggcgccgctcacgtactcctccgggaagaaactttggttcacacccctacgaaagacggcgatccccaccaagaaggttctcgcccagaatctcgcccagaagagatgaaagggccagatcaccgccccaaaaatggcgctcaaaatccccctacggtgatggtagatcacacaacggatcccgtgctcgcaacagcccaagacggatacgcgatacaacccctggcagccaagtcttccgatccgcgagacgagacgggcctgctgtcttaaatattgacaaacccacaagacctccctcgcccagagtacaggcagaagccttgttgccacagagtccaattcatccctcgcatcgaggccaccctcgtgatgcggcgaaacgagatcggactttgtcgccatcgacacgcgtttcacctgcacacgccttggcctcacaacccgccctggtatctcgatgttcatcgccggatgtagaaaagcctgttgtgatttctcgcagatctcgcagtcgatcgccgattcgctctccggtacccttacaacgttcgtcgaagtcctcaggtcgatctccgtaccgggatcaggtctacgatacggagttctctcacccacaacaacggcaagatcacgaggaccgagtatcgtttggcaatcattcgcctttttcgattagagcgcatttggaacctcagacaagcgggacccaggttggtggcaacatcccaactcaaccgaaaaaccacagtgcaagtccacttccactgccgccatcaggaccttatcagggaccgaggccgccatctaatcagcatcgcggtccttcccatgcctctttactatcagcgcctactcgtcctcgacgaggacctggcccacgtgaagcttggacggggtccccgccggtacgccgcggacctgttgcagcttcgcatgccccaccagcgggtcctcgcgcttccttttcatcccccgtaccaggtggcagttaccgacatcccacttctcggcaacccaacactccgtctgtaactcaaccattggcccagaagggggtcaaccatcttgcggggctatgcaccatcgtaccggaaggtcggagtcttccgtcgcttctagatcctactgtggagaagcggttggctcagcttgatgccgacaaagaaaaactccttgagcaaatcgcggagacgcagaggtctaagcgagcgggacttcgagactgggatcgactcgatcgcgaaagctcaatctgcgcccttaagagcgagctagctgaaggccatctccagcgaatggccgatgagagtattgggagcggaaacttgttctagcaaggcacgtgtacatctttgtcctacaatggcaattgatctcggcgtttttatctggccatgtgtcgggtggcgtcaaggtgttgggcaggtctaggtagcggtttttctctttccatgttgtatcaatatgatgacttgacgacattatgtattgaggtcctgttatatgaatatgtaggaatgtattgcgcttgtagacatattaagtacataagaaggagtagatatctgatagatgcaatgcctgtatagaagtcaaaccacatatacacatatactgtatgtatgtacatgatattcaatgcaaggtacatatgtacctactatatgtagtagggggatcttcctagatcattgttatcggtgctaagtacaattctctacttcaagtaaagtatttccctggctaaaatgcacacattagatacttcgcaagcgtgtacttatatgtatatacgtactactctacgatttaaggtatgtatgtctgtatgtccgtatgtgtggatgcctggatgcctggatgtcgtttttttgtatgcactgtatttaccgtactgtatatacatgtcatgtacatagtgcgtctctattgtacctgatctgcgagtaatttaagttccccttccgtttcttgccttcgtgtcaacaactcggctgttttggtgtagactcctaccaattctcaaactcgcccccttctccctttctctttctccctcctggcttaggtcaatattcacactgttaatcgagatacatttccggcataatgaatatcttcaggttattaggtacgacataaaaccaatgcaaaccaacgcgatatactaacgctcaatcgcagccgacttctcccatctggcgtcgatcttcatgcttttgcagaagatgaagacgtcaagtgtatgtcctcctatccacgaagcctcatatgcttgcgactaatggcggatcgcagagttgctccgggttgtcgttcaaatcgcaggtgctataccttctcgtttttgtcactcgttacctcggtaggttacgttgccgtcggcttcggctttatgttcataacaatcgctgacgcgctttgtagatcttttctggacattcaccgactctctgtacctcaccacgttcaagcttctgtttatcggttcctcggcctacgtcatctaccttatgctcaacgactacaaacccacacatgatcccaacattgatactttcaaggttcaatatctccttggaattagtgcggtgcttgccattctctttccgcgcgattatcgcatttccgaggttggttgcatcctgtctatggagtgggaaaaaaaacccccaagactaatgtcatgtagatactttggaccttttccatctggttggagtcggtggccatattgccacagctattcatgctacaacgaaccggggaggcagacaccatcaccacccactatctttttgccctgggactctatagggcactctacatcccgaactgggtcttccgctatttcaccgaagcctccttccaacgttcattccagcctgtgaccattatcgccggaatcatccaaacgctgctttactccgacttcttttacatttactacaacaagtaagcccaattgcctccaacaagcaaaagacagacgtgtggtgcaggcactgacacgcgctctttttttctcctcccagggttctgaagggcaagaagttctcgcttcctgtttagatttctttctactttctgaatgtgttaaggaatttatgatatcttaggatcttccaaaggttcggagatggaattttgaatctgatccgctcgttccttttatatttgcctgggacacgatcacctatcccacaagcaccaagtgccttgaaccaatgcaacatccctccaagctccgacgctgggtgttgctatgaactaatgttttcatgtcaccaaatctgtatgcatatagggatggtcacatgaggcaatcaacccgaaattgactaccgaatatcgaatatctcggaccatgtgcatatctgattgtattctatgttcatcagtgaagggaaatcgtctttgtcaaaacttttgtacttttaggtcatcggcctaccctttttaatgtagcctatgttagatgcgagatccaagattcaagttcaactattcaattattcagagtattcttttgctttgctttttttaaatcgactttctcttttcgcttccattgaatattgacatcccttgtctcttcgtacactcgaagtcttgtaacggatggcaatcaacttctcgcccggtccgtgtatgtcacccatcagacctgtgattgacaaggaggcataaaacgatctagacgctcctggtaaggtatacttttggggagtacacagttagtataccctcgataatatcaaaaagcaacatccacacaaggtcgaccagaaatgacaattagaactctcgctggggcgcggtcccatgcgtcgggacatatcccgtcgtgtagctcaattgggacggagggatggataaatcggcggagaatggatccaaagtgccggcaattgagtgtgaaagattggccatgggaccctggaacgaccgaactccgttacctagattcgagcgaccttgcacattttgatgactatccaaccagccactatgaccgtgtaaatgaccaaaatagtctgcttgcgtcctgtcaaggggaatttggccggcaaacgtcgattctcgtcgcgaaattggcggcgacgggagtttgggggatcgagagaccatctccagtctgggggagcttcttcgcgaattgggcggcgtcaagcgtgatcctccacggcgcacctgacaggttgggcagatcttcacgaagcgagagatcaattccttaggaaccctaataaaatagtcagtgactgtgaaccagacacgccatgtacatatacaatgcgactggggtttgcccaccatgaatagattcgccggacctgagcagatgtcttgtctcggccaccatgctggcattgctgatgggccttggtgaggattttgaataatttttcgcgaattgcaaccggctttccctcgtgacagatcattttcctatgctttatgtcgcaacaaaccaccccgttaacgttatcgatcatatgagttgggaacaatagggacttacatccgaatccactgcttggagcttgaacatctttttgacccaaaatctgacttgtttagcaaggcaattgattgaatcaaagagatcccataccgaaattgggccgattccactgccgtgtctttggggtcaatcaatacagttctgatgttacgggcccttttagcgtatatcaacgctttatcttgcttcttgatggacaggtcctcaacgtagctagagtaaggaaatattagccctgactgcttttcggtttatcaagaaccactcacttctgcatcagttgatcaaactccttcacatcagggaagccgctaagtgcaggcaccacagcctctgacaacaatgtagcctcgttgtgagactcttggttttcaatctctgtttcaccaagcgggtcgcggggcagataccttggccgttgaaggtagcgcgattgggacatgaactgcggcggatggtgtagccgggggtcatctggggttgtcatcgatggaatcgaaggttccgacgtatattgcaaatgctgcaaccccggagacagactcgactgtgggccatagggctgcccaaactgagacccgtacgggctgaaggaatgctgagggaaatgatatgaagcagaaccatgggtgttgaagtcatggctttcttgcttgaagtcatggctctctggctggccgtaggagccaggcactgccatttggtgattcatgagatacgcatcattaccttcgttgcgccttgcaaagctgctcataatgccttgctgggtgggaataccgattgattatcagttcaggccgatctgtttcaaacagatagatgaagaataagataaacaaagagatatatagaggaaaaaaaaaaaaaaaagggcagtatacagcgagtctccgagtgaggtgatgataatgaagaaacgaagactggggttaactcgtttgcatatagaggaagaattgccacagtatcctggtacaccacagccagtatcacccaaaaaagaaaagaaaagggaattggactgtgtctagaagatcactggaagtgagagatagagagagaaggaataattcacagaaagttgatctagaaacggggtagcaattctattaagaagaccccaatggacaaacagtgcaggactgacatggctgatgcccaagatgaagtgcacgagaccatgtcgcgccagagggcagagacaacagagggcatccctggaagacgaacagcaaatattccacagagaaaaaagaaatgatggagccaggcgagtcgaagctctgtaaggtacggaagcataggtattaccaaagctttgcagggaagatagcggcatctaaccagaaaaaaagaaaagaaaagcagcaagaaaggactggggttcgtggtcaagattctttccgacccgccgaaggtatcgaaaggtggaagcaggctgatacgacagcgcacgggagctaatggtgatacggattcctgcctttgccttttcaccctgaagtcacccatttgcttcaaggagcccacgttgaggatatggaagacagggctattcgaggcaccctatcggagacagtgatgacttttggagggggggaagccccattcggctctcctgatttgaccgaagtacagcggggggcgaaatcatcatctccccgaattttcctatacttagagcggaacaactctatgggatcttcccgactcgaggaaaaggggaactctttgtccctgcacgtttgcttcgtcaaacaaagtcggcaggagattcggcaaaaaggaatttgtccatgcaagtagccgtgcaaattggtaaggaacatggattgaggatccccttgaagttctgcatcttcaagctgctccccgtttgagaagaggagaaggggaaagaaaggagagagaacgggggtcatcaatatgtgtacaagggcaattgatccctcgagattggaagttttcctagggaaatccctgttatgtcaatgttgtactgccatgccgtcccaccttttatttttatttttttattcttctaatttcccagagatgcaagtgaaaagattttcgattttcgattttcgatttgacgtggcatttacttaggccaagacttggacttttgaaaggaaaaagaaaaaagaaaaaagaaaaagtaaaggacggagaagtacaggggaagaggaagtagacgggatgacaggatgacacacgtttggttgaccggacaggtgagacaaaagttcggaaacattatctggtgtgacggtacttttccgagatttagtatatttggtatttttcattttatacaggttgtatactatatatatatatatatgctctatatttatattataatattcatgctttatgtagtgtattagtacgaagtactcaacaatatagttacattcttcaaaccggaatcatcacaggtcttcacatcgtaagttcataggttagttgtacacacgggtactgggaggaaaaaaaaaaaaaagaaaggtatgcagacagtatgcaggcggtatgcagacgtcaaatctgttctatgccgatccccggtcaaaggccactaaatcgcggatgatccatttccaatgactttggtcttgatcgcctcgatcgaatacccatttgtcaaccttgcgtctccacttgtcttcctcagcccgctggcgtcgaatgaattcggggccgacatcaaattcctccgtcataggtccttcgtcagacgattcaccggcactcgcatcgtcccctgctgggaattgctggtcctcaatcgctccagaatttcgtccattcatggggattttgtcatccaagtcgtccaggccggcaaaaacgtcgtcttcgtctcccatagatgctctgagccaacacatccgatgtggatcaaagaccatcccaccaacggtctggacattctgcatcgcgccaacgttggtgatgagagccggtgccggtttaggtgatttgggagcggtgtcaaattcctgaaccaggttttcgtttccttcccatcggaaattaatagggttgtagcgcatacccctcacagctggaaaacggttaatgagattgtgggctttttttttaaaaaaaagaaaagggcaaataggggtcttgcttacatttggcatcctgcactccagatcccatgggcttgattaagtgtggcttggatgtcgacttggcattcggtttacctttccggcttctgatcgttgcagacgccgggggaatcctcgagataggctgggacttccagtttgagttgaacgtcgaaagaggattcggttcacggcctttggagttaatagccatggaggcaatgcgttgttccctggcatttctagatgcatttgtatctcgcgcaaacctaggtgtcgggctgcgcaatttggaggttgatggagacgtgtaagattgaggtgattcatcgggttcaatccggctctggctgagtctggcgcggaccgaccttggagcccctcgaccggtgggggttttgacaaacttgctctctgccaagaccgacgtagataggtcatcaaacgactccagctctgttccatccccgaaattgcgtcttttagtgggtcgtgtgattgtacgttttgtagaggaaccgagagattccgcgcttgtgtcgccaaacccagcacggagcggctcattgcgagttggacgggagagtcgagagactgtgccctgcggactaagaagcccgccggagctatctgaattggtgcgacgtgacgagcgataccccttcacactggcatggtgtgattgggattctgatacaccagccggcataaatggcacctgaggcctgcggcccagcgacctcgcatcggttgttgggagatccacgggtgttttgggcctggcagacggaaggcgggctgaacgatccgggagtcgttgggaagcggtcattgaggcggtcgagcctaggccacgaatggatggcagggatcgcttggtcttcagacgcctaactggagtgttaccctcgtcggcctgggcaatgtcccgggaattgcgagacccgagaaaccgtcgactagagagtgtaggagtcggcgatgtcggattagcgatagggcccgggagacttgaagttgacgactgagaagagtgccctagacgcgattgtgatgttcgaaatttggagagaggcgcaccactttctgacacagtctcaaggtgggttgaatgtgtccggtcatgaccagacaagcgcgggatacgagttcgtggagatcccgtcgcactggtgaacgtgagtgtcgttgcagatcgacgggccgggctggatggcctttctgttttgcactttatgttgggattcagagcgggttttccaaaggagaaagccttctcattgtcgatatcaataccagaaaagaagtcgtcagcatcagaaggaacatgatccgcctgactttcttccgcctcgacattctcggcttgggcagtttgtcgcttttggagagaagcactgaaatcaaggggaccttcgggaatgacgataccgtcgaggccatcgtcttcactttccgcagtgagacagcttgacacgctggggctggcgatggagatggaagaactgggcactgaacgaccatcccttgtggtaccaccaactcgtacaccgatacttccttcagaccactcaagatcaaagtcctccaaagtgggactggaaacgtagaaatttgcttttcgatgggataattcgagaggctcgtgattagcgggaagttcaaaatcctggttgaagtcgtcttccgtctcctgttcaatgttgaagccactgccgacattgccaatgttcaatttcttcggagaccgaggagttggcgctttgagggttgggatatctcgagttcccaaactatcattgtcatcttgaaatgtgtccaatggtcccaagttaggttgcaaacgtgtcgggaattcgtcatcccaagatggggacgccgtggatttcactggactggtagcagcagagctcaaatttcgaagggagtcgggaaacatagtttcccgaggagttttgagctgtaacagggtttcaggacccgggagctcaacatcttctgaccagtcatcaacaaaagtctgcttggtctttcgagttgacaagcgcttgatcgtgcccccaataagagctgacttggggatatttggaggaatgggaatgcccgcagtcttggcggaagcaatggcatcttcttttgcgaattcatcattatcatagagtggtacctgccagtcttcgtcgcccgcattagaatcaatatctgagcgagcagagcgtctggaggagatagaatctcggtgcccagaaggccgaaatgacgagtttgttatggacccagcgctggatgcggtgcgaaagtgaatatcctcactgaactgcaagtcgtcgtcatcatcccagcattcaatcggctcgtcggtacccggtcgtaggtggattggtaaagattccatgatcggcgaagcgaattgatcgaaggggtacagataacacagtggacatggaattattatagacgtccggaagcgggtgtgattaagtggcagactcagtgttttgcgacactggtgagggttcagggggtgcggacatgagcgtcattccgtgtcggttggtagggacgacagataggagcaagtgagaagcacggcttgactgttgatcgtagcgtgacgagtgagctcgaatattgcaaggcgtgttgttagagaaatcagcctaatgaaggccggtgctctagagccgatttccccgaacgagaccaagcgggttcacaaggcgacctgataaatgccaggtcctcatccataaacattcactaggtagaggacacttaggatcggggacactcctaggcacttgattcccactgctaatctttgggggaattcaaggaacttaattgcaagaacgaagagacaggggaaaaataaggcgtgtcggttgtggctggatctcaaattcctcgtggaggagaggaagaacgtgacagatccccgtattggtaaagtttcaagccagtaagataataatgtaataattttaccaggatattcggtgcagatgtggagactgcatatttccaagtgtgcaggacgtattttacagccatttcatgtaattaacagaacggtgatgtcctcggtatttaacgtttgtacttatatggtcatattgaatgtcaatttgatgtttgaagctgtcaaggtaaaattatctaactacattatgtacatatgtaatctgcaagatacagtttcatatcgattttaatagctatatatggatggtaatcagaattgtattccaaggtcaagtaaccaccggctgtacttccgtacatttcacacccttggagtggtatctgataccttcgacggtacttctccactcgagttctgcctagataacttttccttaaatacatatgtatccattctaaatatctcacttcctaagagctcctaccctatccttctcatctgagccttcattccaaatatgccatctcctgtttcaacggaacctcgaatcttgcgatttcccagatctgacgagactggggcttttgtactcgtccatgtctggtgtactggccctgctccactcgatctgagcctgacagctactgagggggagtcgccctatgttagcttgggtgcgtcatcaccgaatgaagtttgggaattatgagctcatgttgcgcagtgaaacaaactcgcttgaaagatcttcaagcaaagaattacgaaggatcccatgatgagtgggttaaaacagtctctctcattctaggacaatcttcagctcctcccgatgaaccagattgggccactggtctcgaagcttcggccagtatatcgggttctgatgaagacaaggcaattgtgatcacgatacggaaacgagtgcagactatcacagttagtgtttcatgccggtggcttatattgtatatatcacgactaaccctaatatagcaacgccttggtgcttttaccctgaggcaggacgatgaacaagctgtcgagctttttgaatggacaggaatcactgcggctagagctcatgtgctagagcaacaagtatccagcctgactggccgttatcgccttgctgaggacaccatacataggttgaatgaacagcttgaggagctcatgcatgcaaaaactgagcatgagaatcgactggtggccaattttgtgcagatcttgaacgagaaaaagcttaagatacgcaaccagcaacgtcttctggcatcagctactgtggatgccacaaaaggcaggtgacacaaacagagaaacctggatgtcttgactgactagatatcgacagtctccgagatacaagctagtattcccgaagagtcacatgggactgccaagaaatctcattcagctaagagaagtgccagcaacatgagcgacatagatgactctgatgggtttgaacaaatggatattgatccaataaaggctgatcgaggtgccaccaataaccaaggcaccgatgacgaagagcgtttgactcatcccttagacgacgaacaaaataatagcacgacggacgacgattcgtctcaggatgaacttacccagctgaagcgagtctccccagtgagggacaccgcgccgcctcaaagagatttgccatttgctaaaaggactggtggccctatcaagactgctccaatccagcccagcgaagatgccgaagaaaccgcgggagagacagacgatgatgagctctaaattgaccacctggagcaaattagacaaagtaattcaacagagcgagatacaattccatcttatgtgcagaaaaggcacccaattgacgcagcagttaaagagttccttttgactccttgatcttgcaatacaaaatatagacgtatcccccgttttgttcctcctctgccctgttctagtcgttgggacaattatttgttcccagaagtcatttctcctggtataatttcacttcgtctgtaccatagaccctcaactatactttccattcaagagctgctacgcacgaaattacgaaagtagcccagattcatcatctccgacgcccatggactcgaaattttgggggttcagtcttttatgtacaaggcaaccactaccgattaatcccaggcgacaccggagaatggcgaagaggtcaacaggaaccggaaggggaaaaacacagaagatggaaaggaaacagtacatcaagaggaaaatttaagctgtggtacaataaaaacgcctgcaaccattagagaaacacagaatgaggtcaaaatagaccccgatctaaccatacaaagcctgaggagacatttctcctgcggccatgaagttggtctcagggtttccagtggccttggcagcggaggcgcgggccatggtgggcgaactaaatcagagttagcaatgcaaataaattaatgataaatagggtactcaccttctggagatagcgtcagtgaagaagaagtcttcgatcaccttcttgaaaggagccccggtggcttgagatcccttgttctgatccacaagttggaccttgctcaacgagccaaccgaggtcggctcaacaacgtcatagcggcgcatgacagggctgatctcctccatgcggtcgcgaagagcctcgatatcatcataaggaagaggagcaccgaggaattcgctagtggcacggatgatcttccagtcgtcacgagctgcaccgggaagagaagtggcagcacgcgtaacttgcacgcgaccttctgtgttgatgtatgtacctgacttctcggtgtacgcagcgccggggagaacgacatcagcaagttgggcaccgcgatcaccatggtgtccctggtagacgacaaacgcatccttcgggatctcgctttgggcaatctcatctgcacccaaaagccacattatcttgggggtagtttgagcaacctgggtagacggcgcagtgaagccaacttcataggcaccagcccgagacgccgcacgctggaggacgttatagccctgccactccggggtaatgaagttgcttgcattcttctcgacgaaaccaccgacagcctcgaagattgccttagcatcagggtgctctgcagcagcgctaccgacaataatcattggccgtttggctccggcaagcttcttgccaaattctccggacaaggaggatttcaaggaagagacatcagtacccaaatggttgaagtcaaatgtgctctcaaactcctcgccgacaagtccaatctcaagatcagatctaatatactgctttcggatacgggcgttcagaacagcggcttcgtgacgagggtttgttgcaaccaaaaggattgcatctgcctcctcgattccatagatcttggaattgaaaagataattggaacggacatcgataccgtgagcaatgggggcaccacctccaggttgatccagggcaaggttgtcagagccaagcttgtttgccaggtccttcatggcaacgagcgactcagcatcaaccaagtgtcctgcaacagccttgaactcatttgcttgtggctgcagcttctcgtgggccgacgagatctccgttagagcctgttcccaagtggcagggacgaatttaccctcccgacgaatgagcggcgttgtgagtcgttgggtcttcaacccatcgcatgcgaaccgcgatttgtcattgatccattcctcattaatatcgtcattcaatcgggggacaacccgcatcacttccaggcctctgctatcaatgcggatgttagagccgagagcgtcaaggacatcgatcgattcggtgtgcttgagctcccatgggcgcgcccggaaagcatagggcttcgaagttagtgcaccgacagggcaaaggtcaatgacattgcctgaaagttctgagttgaggttctgctcaaggtaggttccaatctgcatgtcgtttccgcgaccggcagttcctagttctggggcgccggcgacatcattcatgaatcggacacaacgggtgcagtgaatgcatcgattcattgaggtcttgaccagtgggccaatgttcttatcctccacggcacgctttccgccggtttcatggaatcgaccccgatcggcaccgtaacgcatcgactggtcttggagatcacactctcctccttggtcgcagacaggacaatcgaggggatggttggcgaggaggaactccatgacaccctctcttgccttgtgaaccagtggtgagttcgtcttgaccaccatgccgggttgcacgggccaagcacaggaggccaccggctttggggcacgttcgacttcgacgaggcacatacgacctacagtatcggtaagtacatatgcctcaatggtgtgggatgggggattgtgggtttcacatacagtttcctgcaaccagaagttttctttaggggactaatgtcagcaaaaaacaatgtgtgactcgattaaaggcacatactcatggtaacaatatctggtgcgtgttagtactgcaggtcaattgtattggtgaggtcttgtcatacctgggaaccgttgcgcctgcctgctcacaggcctggataagagccgagccagctttggggagagactgtgagtgaaggttcaatgggttacctcgagtgattatttaccttctactgacacctttttgccatctagagaaatgagccatcagttatcgatcaattttgattgagtagaccaagattggacttaccaatggtgagttccacctcggccgcgcgaggggctgtcgtcgcgaatgcccggggggtgaccttaggaacccggagggaccgggcggccgcacgaaacagctgcggccgcatcattggaaggagaacagagatgtgagggtgggagataaggtggaggatggcgaggggttgagatcctggtgacggttgggagttcagagagcactttgcatcggaatctgcggttctaaggttacataatgggactgctgaccatcacattgctgactaagggaaacggcaaatgggctcacggggattggctagattgactcggttaggcggataaacttccgctccgggattccttaaaagccaccgtttctgccccccttattttccttttcctttcttcaatttaaattgttgacgggcatcatttattgtaggaggcaggccatttccctgttcctatttcctctacagcatgtcccaagagcagaattgcaccgtagctggagctgtcaaaggttcgcctaatgatgactttgttccttaccaacggtagctacatcattttcctaatatatatagtttcgtacatctatcaatataatcctctattcatcctgtacattattcaccgtatacattccgcggtttactcaagatgttgctagatcacatctattgaaacttcggtggcaatgatctagactctggtgtatcctatatgcaaccaaagtacatctctatgccctgcgcatcctaggcagtatacacacaacaagaggaaaagatagtaacgaaaaagctcttccaagcaacacctcgctactatgagatatcatacaccgaactaataaaatacaaatgctaggctgcagcttgagaatcactaacctgccaagtggattcttgcttggtgcctggtaaccaagtacgggaaacactggcccctcttggtcgaacatggccgggccgatcgtcttccttcttggagttgtttgccgcagcatggaagttgttgggggcaccttcaaaggccctccccgcagggaaagcataaccattagaatcccatggcttgcttgagtgccgaacattcattggaagaatggactgttcgccacggaaatgatccgtgtttgccctttggtcagctacatcatcatggctattgcgatcataaaggtagaggccaacgaaagtgaggccaataccaaatgcttgaatcgaggtggtcgagctcccaaaccatataatcgccaccacgatcacaaaaacacgcttgaccaatgatgcaaccgaataggacacaggagaaaccattgacagcaacacaaaggccaggatgttttgggcaaagtgtgagagtccattaaacacaaactcaagagaaagagcaccgtgatccaatgagccttgcttacccgatagcgatatcgcaccatcatggatgaaatcagatactagtgggtaaccctcgctgacaaaccaaataggcagagtgaggaaaaacgccaacccggagcaatagcaaagcaagttgagtttgtccaacttccgccgtccgggggtttgcagatctgattctgcacggtctgcctcgttaaacagcttcttcgagaatatgttctgcgagacaaagacaagagctgcaccaaatgcgcaaaagataccgaagaaattggtagacactccggtcgagcacgcaagcatcacacccagagtcagagggatcagggataagtaggttgcccgggcatatcgaatgcggaacaggatccggtatgctagaactgtgaagaggggcgaaaggcccttgattgtgtggaccaaagatacggggatttgttcagtagccatagagcttagaatgtgaccggccaattggaataccgccagaggcaaggctgtggaaatcacgtcgcgggatgggtagcgaattccatgttggaggaccggaatactttgtcgtaaccgaggtataatcgtggaaagatacaccaacagcaagcaccaaaaggagacaaacgcaaattgaatcatcgtcaatgtgattggcatgggaagagcattcaaaatcgatttggaagatgtatttgtgagggcagaggtcaggtaccagacgacacagagagccttgaaacagtgtgttagcagcctcactaaatgaatttcttctatatttgaatttctcaaagcgctaattcaacatacagtgagtcggtaagagactggggcgcgaagtgcttgggccaattcatgagcattggcactcatactgccattgcgtgttctgattgtcgtgatggcttcgctgatgctctttcgcggacgatgtttgggatttcgtaacgatccgttcccatactctcgcgagtaaaagcttgcttttctcggttcccagagctcgttcggggcatatttcaccgaggcgcttcggtttggccgagctgaccccgcgacggcgtcgagggtgtcttcgtaaggcggaaatttgtctatcgggctgttcgttgattgaggaacggaggatttggtagggatttgcaattcggcctggcgcattgaggcgcgtcgcccatgaccggttactgtagttgtagccatcttcagagacgtcaattccccggaccccgaaaagaacccacacttggtgtcacttacccgaaaagggcgagaaagcagctgcggagaggcaatccgctcaatggtttccggcgaggatatgtgtccgcttcactaattatcggaggaaaaagggcgggttggttcgccggtttgtcgttgtcgatgacgaatctccttgagcgaatgagcgtcgagtatagaaacacacccgtggacacgctttcggcgaagccaagtgatggaaacaatatgtgaatatacctagtgatgcataggcatatgttagacaaaggaatggggaaatatatgagaaagatgtccccataataacttgtaacgcgaccaaggatatgcaacttgattttccaggtacggagtaccgccacttacattacgggatacgaagttcatgttgatgatgaccgaggaagtctagagtagccacaagtacagatggatgatattattcctattgcatttctactgtgtattctttttttttcctttctatatcatccttgtgtttcctataataagaaaaatgtctcttgttccgtcttcgtatgccctcttctccattacgcgtcacctgggtcacgtggtatggaccctgatctgcatgcaaatgtcttggctttgggagttcggacagggaacattttgatatacatgtacttatgcaggtccttgacgacgtaggactataataatctgatctatttggctcaagatgatattaggtacgttgtaagagacaaaataatgtttcccatccttctcagtatgaaagtacgaaatgagtctcagatgcagaatcctgtaaaatcccacaaagcaccttttctatgtattaatagcatataacctaggaagcttttccatgtatataagctttcaatgacatgtagatcttgaatctataggtatcaacatttgaacataagtgaagatgcacatacataatgtatgtaccccatattccagagctatactcctcagacatatatggattgtatccatccatggatgagactcttggaatgttcatgactatgcctaatcaagtagtccacaagaacatgaccggaacatgtgtatagggaaggttctcagggttctcttctcactctgctccttccttgacttgtttcctttcctcctttcctccttttatctctatctctctccttccatctcatttcttctcacatcccaatctcgtctcttctcatcacttctttatctccaaaagttcccttatgtttactgtgatctcccaagaatctgctcggaatccttttcgttgcatgtaagctcacttggtttccaacgagcctgtttgtcccaaccttcacgcagcgactccatttgctttttttttcgcctctcttcttttctgtttctatcttgtttctgcttcacttttaatctcttccagttgacaacatgtctaccctaagcggaccttcaccacttggtcgaatggggaatggaggccgttttacctccaatgatgccattgatgtgcgaaatctttcttttggacgtgaatcctcggtatgcttctcgggaaacaatcttgaatcaaattcctagcatactaaccaccttggtcgcggcagagccctcagaactccattactcattacggttcttccgatgcggctgaaacatcccgacatgaaaagttgcaggctttgtctggtgaagggactgaacactcggctagcaaggtatgtgtttcctacggtatcgattcacatgtgtatgtgcctgtgatctcacaatcccagaagcagaagctagatcatatcaaagttgaacctttgaatggacaaacatcggatcttgacagaatactggcaaagatttctcccaaaacaatccccccttcacgttccgaaaccgatcactcttctgtttcgtctcagatcgctcccaccacgtcggtaccatctttaacccccaatgagacaaccaatccttacccccaggaagacagaacggtagagctacttcgccttaagcaggaactccttgctgcaaattccaagattgccctgcaggagcaagagcttgctcaaacccgcgtgataaaacataccttggatcaagcccttggcccgtcatcagaggccgatttcggcagccgcgaaattacagaacagaccattagccacctacagaatgcttttaatgcatcgagctctgcatttactcagtttcaagatgcatgggctgtccaagatgattcgcaatctgatgtctcggatcctttgtctacaggagcttacaacagatcccgcgcactctgggcccagaatgagactgctacagacagagaatacggagagagcctttcaggctctagcagctctacaagccaggacccaaatcggttctggggagtctccagcatgtatccttcgtttgctggcccaccgtctctgcaatcgcaaagaccacactcggggtcctcacctagttcatgtggattttacccacgtcccattggtgagcaaatgttgtatcccccagggcccctcaccggggctcgtcgttccatcgctcaaaacagtaggggcggatctctatttccaattcagtctaccccttggggtgaatttgcttctgggtcctccagtgagcagaccaccaagtcacctgcttcgccgaagagaccccccagcgcttttcagcaggtcggactttactcagtgcccccttacccccctcgaccgattggaagccctctctcacccactgccacagagttcacaggtgccaacacgaatgaaaccacatgggccaactcggtaagcgataacaatatgtgtactgtttacattcattctaactcttgtcagatgagcggaaattccatccagacatacgtgtcgccactggaaccactcaactatcgacgcctactcgacaagaatgtgtcgtgtgattggaagtacattgtagacaagatcatctgcaacaatgaccaacaagcttcaattttcttacaacaaaagctcaaggtcggcacaactgagcagaaatacgacattatcgagtcaattgtgcgtcaagcctacccactcatggtcaatcgctttggaaacttcctcatacaacgctgctttgaacatggtactccggagcaagtcatcgccatcgcaaatgcgatcagaggcaacacgctaaacctcagtatggatgcatttggctgccatgtggtccaaaaggcatttgactgcgtttcagaggagcataaagctatgatggtacatgaacttctccgcagaattccggagacggtggtccatcgatatgcgtgtcacgtttggcagaaactctttgagctccggtggagtggtgagcctccgcaagtgatggcaagagtaaacgaggcattacgtggaatgtggcacgaggttgcccttggagagacaggaagtctggtcgtccaaaacatcttcgagaattgcgtggaggaggaaaaggtaagattccctgccaacctgacgcgctaccatacgcatccaacccctttttcgctgccctgcttttctgtcggttccttgtattgattataccaatactaaccatctttgaagcgaccagcaatcgaggaagtactggcgaagatcgatgtacttgctcatggtcaattcgggaactggtgcatccaacacatctgcgagcacggtgctccccacgacaagagccgcgctgttgagcatgtccttcgctgggctgtggattacagcatggatcagttcgcatctaagattgtggaaaaatgtctcaagattggcggcaccgagtttatggatcattatctctctcgtgtctgcactggccggtctgaccggcctcgcatgccattgatcgacagtaagttgcccgggctttaacatcatgagaaatattaattcgttctttagtagcgggtgaccagtacgggaactatctcatccaatggattttgatgaacgccgcgcctcatcaacgagagctggtggccagccacattaggtattgctccctgacagtccattatctacttggtgtggtctgaagtctaacctgattcaactaggaaacatatggtctctcttcgtggctccaaatttggctctcgcgtggccatgctttgctgcaacccgtctcacgctacacggcccggtcctggggctggaatgcaaatcggccgtttcaacagctttaacgaagacaaattcaccaccacgggcccgtccagtggtcgtttcggtcgtggacatcaatggggaccccattatgcgccacttcgttgagcctgtgtcactgtgtcttaatttgatacgtcatattcatttttatcgccatgcaaaggaaaaaaataaaaataaaaagataaaaagaggaaaaggaaaaccgacaatcaaccgacaatcaacaactaggaaaaagcatcttttgagcatttcattccctctgcttccaagcagacagtctgtctttgccagtttgcctgaccgtgtcttatcaatatctgttgacccaatcatttccgtgtttcaatattgcgagttatcactgcttgccgatttattcatttggcttgctatccccagtggctatcattttattcaatctcatagattgaagcttggggcgtgtcacgttagttttctttaaaaccacatgttattattcagattctattccaatcaaatatataatccatcatgaaacttatgtggatagaacataatttcagggagcagcacccgcagtctcatcggatgcagtcatcacttcatccttctcccagggtttccgtcgccgtggtttctcactggaaatatcatggccactaagcactgtgtccgggatgtcttggatcccaggtattggctgccccgtagtgatgagttccacaatgtgcgcgaacgacgaagggtaagcaggttcaggatgcgctgatctctcagtcccagatgtgcttgggtctaatgcttcggagatttgcaagtctgtattgcctagcccatggggctccgttgtccgtgatgctaaccatgatttgaaggcagcaaaatcaatagcaggagtgagcttttcttttctgtactcggattagtacccgacgtattgtgtgaagtgtattcccagcataccgggagaaaaagaaacactttgcttgcaggacgaggtcgtcatcccggttcatctccacctcggtggcgggggtgttgggatggccaagtataattgagaggccatttgcaaactcgggatccgatacgaaggagtaagattgtagcctttcgaagacctgagtttctgagggctgcgccattatttgatgattcttagaatacagaaaaggtctgggatgcggaggatgcggaggatgcgtggggcagcctaagctaactagccgaggctcgtctgctctggtgcgttctccaagttctctactctgcaccctttgacgctttggggcctttatctactcatcccgaaaatcggggaagttacatggcacttgcgagaaaattcgtattttgtatatacagacgcctttccctcccatgctaccttttggcctgtgaacagaaaaatccagggatatcttgcgccgccaaacaatgcaatattgagataattccacgccctagaccatggtatccactccacctgacgtttggctgcgtgccccagagtgcagggggttacttctactttgacagccaggacagttgtgcacgacctcgtgggcaaagagatcgcagtcgatacaaaagtggttatggcacgcggtacactcgtagcgactgctcacactcatccccttggtctggttctctgccgtttgccagtgatcttccggaggcacggatggaaaagaaagaccacaggcaaagcaagcggagcttcgcgaggctcgacgccacggcacctcgacccagttgatcaagggaaatagatgatgatacgatcgtgccagatgagtcgaaaggatcaatgtgagcccacaagatgggcattcagcaggaagactacacactttgctgttgcatcgcgagcaaagatagcctcctcgtgagggctttgaatggcatgcgcagagtgagggactggactccaccgtacgagaagggaaccccatcatcagcaacgagcttgcagattctttctgtgagtaggccgctgggggtgtagtcacgtccatcatcagctcccgaaagtgctgctcgttcaatgctactccatatgctgtttcatcaccaccgttggtttttgtacacagttcccggcaaattgcaacctgggctccgagacccacgataccaacccgaatcttgtcgctaatgagcgtgtctatcgttcggtggatgtccccaggatcagaggaaagaagggaaccatatataaacagcacttctcgagtgccatggctaggcgtatggctgaattcactggttagtttcgttacttatagcgggtgtaaagaagacatacaaaagagcacctcgtgccatctccaacccattctgaagactaggcaaacctttcggatcttgtgttttgagggtttggatggctgtgaggtgttctgttggattgccactcatggcactgactcggagcgcgagaccgtctctcaggccgaggacaccaagctgcgagatgggattttgttcaaaaaattccctcacgaattcctgggcatatcggagagtcaacaagtatctcgtgggtcgcaagtccttctcggacatggattgtgaaagatccagaattaggatgagatgtcgaatgataccgcgctgtagtggtgtcgtatctttcaggagcctggacgaacgatataatttagcaagaatggacagacactgtaagggaaacgaactgaccgtttccgttttccggcctccagcagaccttcgacggtcgagtttatggtaccatctgcaccctccactagtgtctcccaggttctggatagctcccattctgcgcccccgcgctgctttcttctggctcgcgaattatcgccccgagtcacctgtaaatcatcttcatcttccgttacctcccccacatattcttcgtcggagtcggccatgtccttagataagagtggagagagagagagagagagagagatgatccatgcggaagaccgaaaatgggtccaagcttccgacggagctccgttggagaatatcctccctatctcctttttcaccaagtcacaactctcaatcacttcaaaactaagctttttttttttttttttgacatagctccgacgatagccgtagacggttaagctagaatatctccccccgatgtggggaagaagatccattcgtgctggcgtagcagttcaagtcgtccgtccagtcactgtccgccctacccctcctcttctttctcgcacactacacaaactttctctcccgcattctcctcgactgcgacctcgactgcctaaacccctcgctacattagacctgagattccctcccattaggcattgttccgccgaagtccgcatgatggcgtctcaagagcgagagacacttcctgacgtgtgagtgatgccccgcttgggtcattctggttattctttccctttttgcttcgtttttgcttcccaaatttgagcccatatctgctttctggtttgcagcattaaaaattgacatagcaatagggctaagcctgtcaactaccatgtctctcttttcgacttgcagttcggtggttcgtgggaatacaagggcgcgttgaagatcgatctcaaagtcacccgtgctaccagcgagattgtgctgaactcgaaggagatcgaagtacaaagtgctgaggtattggggaaagatggtaagtgcgggagcacatcatcagtgtgatatagaaaaggaagaagactaatacccgtcttcctttcatagggagccagttggccaaagcatccggaatcacctacgacaagcaatcggagcgagtttccctcgctttctcgcaagagattgcgccggcagacgttgtgctctctatcaactttacgggcaccatgaacaatgccatggccgggttctaccgctccaagtataagccagtcggagagccctctgccgacacccccaaggaggacgacttttactacatgctaagcactcaatttgagtcctgtgatgcacgaagggctttcccttgtttcgatgagccaaacttgaaatccactttcgatttcgagattgaagtccccaagggacagaccgcactgagcaacatgcccgttcaatccgaaagggacggacacaagcccggtctgaagtttgtcacgttcgagaagacaccggtgatgagcacctatcttctggcctgggcagttggtgacttcgaatacgtcgaggctatgaccgagcgcaaataccagggcaagagtattcccgtccgagtttacaccacgcgtggccttcaagaccaggctcgctttgcactggaatgtgctcaccgcacggttgactatttctcggaagttttcgagattgaataccctcttcccaaggctgatctcctggctgttcacgagtttgtgagtaaccatttatcccctacgaattccaagcttttcatttgagctaatcgcgggtctctaggccatgggtgccatggagaactggggtcttgtgacctatcggacgaccgctgttctgttcgacgaaggaaagtcggacaatcgctataagaaccgcattgcttatgttgtagctcacggtcagtccccacgtcgatctttaggtatccatgtttcaagatggctttgatatctgactcatgttgtagagctggctcaccagtggttcggcaaccttgttaccatggactggtggaatgagttatggctgaatgagggattcgcaacttgggtcggttggcttgccgttgatcatttctatcctggtgagctttgttcgcttctggccgatgagtctgtgacgcagtatctaatgtgcaagcagaatggaacgtctggtctcagtttgtcgtacggaatgcccgaggtaatacacatcctgataagaccaatattgacgttctcccaggctgaaggtgtgcaacaagcatttcacctcgactcgctccgcgcttcccaccctatcgaagttcccgttcggaatgcgctcgaagtcgaccagattttcgaccatatcagctacctgaaggggagctctgtcattcgcatgctgagtgtccacctcggcagagagactttcttgcgtggagttgcggattatctcaaatctcatgcatatggtagggcgtcaaagaagaagattttgaggaatatatgttgagtaattacaggaaatgcgaccacaaatgacctgtggtccgccttgagcaaagcctccggccaggatgtgcattctttcatggtaagtagatactcgccccttggctgtttctttaactctctatttggtcagctcgatatctaactgatctgtcctaggacccctggattcgcaagatcggtttcccggtcgtcaccgtggcagaggagcccggtcagattaccgttagccagagtcgattcttgtctaccggggatgtgaaaccagaggaggatgagacgaaatggtgggtccctctcggcatcaaatccggagcgaaactggctactgttgacaaccgtgctctaacctcgaaatccgacaccgtcggaggggttggagaggacactttctacaaaatcaacaaggacctgtctgggttctaccgaaccaactatcctcccgggcatctggcaaagctgggccaatcgcttgatctcctaagcaccgaggacaagattggtttgctaggtgatgcagctgctcttgcagtctctggcgaaggcactacgcccgccttgttgactcttctggaaggattcaaggaggaacaaaattatctgtaagcaacatctccttatggtattttgctgtcatttctaacgtctcatcctgcagtgtttggtcccaagtctctgcgtctctggcgaacatccgctcggttttctcacaaaacgagaaagtggccgaaggattgaagcagtttactcttaaactggcttccccggccgcagaacggactggttgggagttcaagcccggcgaggactatctcattgtacagcttcggaagctgctcattggaatggtctgtaatgcaggtcatgaagggtgagctcttttcccttgtgtccgaatgctgttgaacactctctaacacaatctccatattttatagatttgtctcagaggccaagcgccgctttgatctctgggcgaccgggaaagacaccagtgctatccatactaatctacggtcagtgattttcagcgtcaacgtatccgagggcggccgtaaggaatacgatgctgttaaggaagagtacatccgaacggactctgtggacggcaaagagatttgcctgtctgcacttggacgcacgaaggatgctgctctggtgaaggactacttggactttgtgttttcggataaggtggctatccaggacatccacagcggagccgtatctctggccgccaactcgaaggtccggcatttgctatggcaatacatcaaggacaactggactgctgttgaaacacgattgtcatttaacaacgttgtgtttgagcgctttgtccgtatgggtctatcaaagtttgccgatcaccagatcagtgacgagattgcgaccttcttcaaggacaaggaaacgggtgcctatgaccgtgcactcgtgattgtctccgacaacattcgaactaatgcatcctataaggagcgtgaggaggcgctggttcttgaatggctgcaggcacacggttacgcataaatgcgcatctacgaacatgtggctttatgtttttctttctttctttttctcttccttctttcaacagtatatttgttcaacctgaattccttgctttagatataatgtaaaaaggtcattggtctagtatccacgaggctgagtttatgcacgggataacatcagttgagcaggtgatctcggagatgtgacgaggattcaagtatagaatgacccctgtgataaatatatttcgtaaaaagccgactaaaaattaagaagaggcatgtatgtatagaaaataaggaaaacacagaaatcccgagaagtgccaggtggttgtgacgtgaaacaaagctgcgcatcaggtgcgtctgcctccctgcacctcctatcatttcaggcgactgttccatcattgtcccctcccccgacttcctaggaacttcgactccatcaacttcgttttttcgtttatattcctctggacttgtgtgtttctcttcagttttcatttcaccttctccgcctcccaaatctcatcatgaatcccgagtggtaagccttccccatttcctatccaccccccaaatgcccttctatgcgccctgatttggtcgactatatgagtctgcctgtgtgttgaatatgactgatgtgatattgatttctagagtaccgtcgcgtcgctgacttgaccgtcacacgacctaaatccccaaacttgccgatctccgttgcctaaccatcgagatagatacgattacctcttcaaactgctcctcatcggtgactccggtgttggaaagtcttgcttgctgcttcgtttcgctgatgatacctacaccgaaagctacatctcgacaatcggcgttgacttcgtacgtctcggaagttgcagagtattcaaccgcaacagaatagcggtgctgacaggtcatcatagaaaatccgcacaatcgagctcgatggcaagacggtgaaacttcagatcgtatggctatattgaacaccaactatttggagcaaagctaataatacatgcagtgggacaccgccggccaggagcgattccgtaccattacatcctcttactacaggggcgctcatggaatttgcgtggtttacgatgtcactgacatggattccttcaacaacgtgaagcagtggctccaggagattgaccgatatgctaccgagggtgttaacaagctgctcgttggaaacaagagcgatatggaggacaagaaggtcgtggaatacaccgttgccaaggtatgtctaaaggcaaacccagaaagcaccgttggggcagattattaacatgtcttgattgcacttttacaggagttcgccgacagcctcggaattcctttcctcgaaacttcggccaagaacgcgtccaatgtcgagcaggcattcttgacaatggcacgacagatcaaggaacgcatgggaacggccactgtcaacaacaagccgactgtgcaggttggccagggccaaggtgtccagtctggatcggcaggtggctgctgctaaacgacacgatgttctctttgtgtggtacggtgcttcactttggcgcaatgttacatcatgaattgaggggtttcaagcggcgtggtatctaatcggcagaagtcaggcttgtcaggcttgtcaggcctttggaaactcgacatgttcctgacgggcaaggaggagcttctgtacggagctggcaatcgttatgatgatgccgttgggggttctttcctgccttggatttgctttagacggcctgcgttctatcctcgttactgcgtttgcttatgcgattaccgccggtttctgcgttctcatgatttcctggccacgtctctgctctattaccttggcccatcattctctctgtgtctttctttccccctttcacctttctattttctattttctattttctatttcctattttcgctttttttttttttgtaggttggatttctcacttgtgaatggactaatagcgagaaccttgcgactcgaggcatactgcctcacacgaggctactttgtatcttctttttcggtaaatcagttcgttgtactatgtagatttcccgagtcaaatataaacgcatacatattcggatcccctatcaggacgtctaggacgatatataatcacatgcaagtcacaggcgccaactcctatactatagatcgttaacacatataatgaggatacctaggtagttcggagatattaccaatttcagtttactcgaatgtgacacattttaaggtcactttattaggatgcaggtaccgaggacctccataaacccaaccaaatccatcaaataatcttgtacaaggtgaatctacgctatgggcgtttcggaatgcagtggagttgccgaggcacacagcacttcggcaaaacgtcatgaacatcccatccccccttcaagccgacaaatcatctcgatggtcttaatgttttaaacgttctttacctcctgacatatttcatcttcttccgccctctacaggttataccttacacctgaacacagttcaataatccagctcttcccatcatgtctcaaccaggagccgagccaagcaaggcagcatctactgctgttcagcagagcgataacatcgcgcacgcgctggcgggtgcaggagggggggttctgtcgatggttttgacgtatgcttccccgcgttttccccatcgctgccgctaaccccatacccactccagataccctctgatcactttgtcgacaagagcccaagtcgagtcgaagcgtgcacactcaaccacccttgatgctgtacgccgcattgtacagagagaaggcatctcgggactatactccggcttggaatcagcgctgtttggaatcagcgtcaccaattttgtgtattattattggtatgaattcacgcgtgcggtctttgagaaggccgccatccagggaggccgagcctcgaaaaagcttacgacggtggagtctatgattgcgggtgccattgcagggagcgccacggtgctgattaccaacccgatctgggtcatcaacactcgcatgactgctcgcaaatctgaggcggaggaaacactgcctggtgccaagaaaccaaaggcatccaccctcagcaccctaatggacctgctccggcaggagggccccaaggccctatttgccggcgtcctcccagcattggtcctggtgattaacccaattctgcaatacaccattttcgagcaattgaaaaacgtggtagagcgccgccggcgtatgacgccgaaggatgcgttctacttgggcgcactgggaaagattatggccaccagcctcacctatccatatatcaccatcaagagccgagcgcatgtagccagcaaggatggccccaaggagagcttgaacggaagcctgaagaggataatccaggaagaaggctggaagggactctacaagggtaagcgaatcttgcgaagttacaccgggttgctattcactgacatatcttcaataaggtattgggcccaaggtcacccagagcgccatcactgctgcattcctttttgcgtttaaagatgtgctgtatgatatgatggtgtctgcccgtagaaagggccgcatcgctaaatagacaggaaatgatccccagtctgctagacctatgtgataactccaatggtcacattccttggagagacaaggctcggacgctcaattccaccatgcttgttcaagtgctcggaatgagagagtacgggctgacttccacttgcccactatagagaattgactttgggtgaaagttctgttctccgaagttcttggggagctcttgggaactcttttaaagcgatacccaggtgttctgcaaatatgtacatatgtagtttagttatttggaattcattcttatactccttttaatcataaaaaaaggtcccatacttcagacctgaccgcctttacgttgggttcaccgcccatcgccgctcatacccgcgttatcgcgttcttaatgttcttgacgcgattctgctccatttctccacacttcctgtgtcttctgcaaatctgggttcagttttctattcccctgctcctctgttactcaatacctctttgagcatctacacgtatttctgccaggtatgcttctctcggtccctttaggtgggacaactcctaatgcctgacagatccaagcgtgcctccaccgtcgaattgtcctatcgcctttgtgactctcatacccctgacttggaagattcgcgctcattacagatattgtcttttatacccctctagagacaatatcctgaacggctgtattgcctaggtcagctctattagggctgccaaggttataccgggataatttctttcctagcaagaccatccaaagacataggcttgcttctgttacagaaaggaacagaaacagacttaaagcggcgagttggaaaggcaataacggaaacctcaggttcagtgtgaacaaagtgggagctgagggggccgatgttatgtctttctcactttgccatcgtccgacaccagacgtgagcgagcccaaatcaatatcaaccaagttacacaggtgagagagcccttcttccttatgctcttcatacctgcctgacctttcttttcctttttgcctagctcagaacatcagctgtggcactaaaatgtctcacggcttttccagtattaacggccggggtatagtccctgcattccctggtctgtcagcccgaagcattccggaaaacccagatattcaacgtgagactctgcgtttgctactgcagtattctagggtctcttctctatcagagaattcatcaactccggcaacctctaaccgtacaagagacgaggtccgagattcctggcagactccacagcctgaagtccagcccagtgaagcctcacctcgccaaatatcacctcgactcactcgttcatcaagtggcagccatgtcactcgaccttctcctgcccactctgccgctccttcccctggcagtccaatccgggtttcccgtcgcgcttcttcgcgcgcttcctcccgcgctccttcccgacttccgtctccccaatcagtttctgtctccacttcttcctcacatagcatctctccgagccatcgcgagcgccaacggactcttagggagagcgtggcaatctcgaatgccagtaggaacgatgaggtagttgctcctaagtcaaaacagcacttctcttacccaccggatgtcatgccatctgcatccagatcccctcattcgcggtcgatatcaccgaccgccgagcaaagtttcatccgtcgttctagtcgaaatagagtccagccaaccaactattacgccaatccttgggtgaatgttcccctggaattggaagagccggacacaattgtcaaagctattccggacacagtcgggtcatcttctccacaggagccgcgtcgtgtcccaccacgtcgtgcaaatgtccaaaagctgctgtacagccgtgagcttggaggcggaaatcatcgccccatcgtcactgatgtggtctcggacctaagaccatggaaatcatggcaaggtgcttcgggcgatctgcttgttctggcttggtcgcctgatggcactcagtttgcggcaggcgccgcagctaagtcagacgaacataatatgcagtataacaaggccaacaatcttcttttaggtgatcttcagagcaatcgtctaaaggaaatcccggaccattggattccacgtccaacaacgtcaccggttgatgacccacggcttttcatgagcgtcaataatatgcagtggattggtaaccgactttacaccgccagttttgacaaaaccgtcaagatttgggacgtggaatcaatccgcaacgtatcctgcactcatactttgcagcatgagtcccgagtggcagtgatgtcagtctcgaaattcaatccagatatattggccacagggacagaatcaattttggtctgggacacacgggatccggaaaacttgacatcgactctccttcccctcgaccgcgatgcacggtataagtccaattttgagttctcgtcaacggccctggcctggggtcatactccatcgactctggaattcttagctggaggtctggccgagccaggggaggatccaatatacaaaggtcacctaggcctgtggcgagcccgtgaatctgcatttgaaaccatcaggatggcttctacttcacataatgtctttgacattaagtggcactcttcactgcccatttttgcaacggccagtcctgaagaccctcacaatgcacggattaaaggtatcggcgttaccacgaaatcaattgtgagagtgtttagccttaattgcgacctccaaaaacgcgtgccgtccgtgatggaattctcctgtccggcgttagatgtcaatgaggtcagtttttgtccaatggattcgaacggcacatatgtcaccgctagttgcacggatggcaaaacctatgtttgggatagtcgcaagggtgatgcaattcttcacgaacttcgccataaggccccgcttaacccaattgatcaccaaagaacccgggaaacggcagacgtgggcgtcagggtagctctgtggggttcgtccatggaccagttctacaccggcgcgtccgatggtgttctcaaacggtgggatattcgccgctcacctgaagatgtccttcttgaggatgccgcatcttttgatgaggagatcatgtgcgcatccttcaccgaagatcagtctcatctccttgtcgggggttctggaggaggcgtgcacgtgctatcatcggggccttgttcggaccctaatataaccactttcgagttcgaacacgccccagagcccgaaaagcctagtgatagtggcgtccttgcaggaaaccagcttgtctcctccggccaggttgttaagcacgaaacatttggtatgggtcaagggccctcttacacggggccttttgccttgtgggctagggacgtcaagcgagacgtttcttctgatcgaattagagatgttcctttgctcaagaaataccagagccaacagttggatggaccgccacccagagatcgtgccgaccttgatctgaaccagcgacgagaagtggaaagacagatacaactcgctgaaatacgaaatcgaggattccacaagagaaagcgccaggagcagaatgatccttctacgttcctctaccagggccctatatctttgtcttcccttggctcatcccggccggcgaagaagaggaaaaaaaaggccgaggaaatggaagtgaagagggaagaaaaccaagacgagaatcgagatgagaaagaggaccgcgggggaaaaagagacaacggagaaggccggagagaagacaaagcgaaaaagaaatctcggagcaaaaagaaggctcgcaaggtggcgcgtcagataatcagcaacacagaagatgttgacctgactctcctggactcagacacggagacgtcaaaccgacatcggtttgaccttgaggagctcctagaggctcttgaggatgataattggttcccggccagtggagaaattgaccccaacatccaaaaagagatagtctaatatgacacatttcttgatattgatgtgtttagcatcatagcattgaagcgtggagttctgatttggggtttcctttttacttgaatagtaaattcagttacagagccatcaataatgtttgtgtacatgggagtaatatgaccgataggctaagatcttgaacgtggtagcctgcactccgtacaaatatgtcatgttaatatatgatgttactataaatggcctttatatataccatgacatcaccgcctcgggaggcgcagttcaggtgcctgaggccacaactctccgcttacgtcccgagtacatatcatatccatagaagaagcatgacctctcattctcactctcatcctcactctcatcctcactctcctctgaacctaaactaattgaatattgccacaattcaagttttcagtcttgcaacatattcaatctaatcgtacctgtcacatcatgtcgttcgccccgccctccgggcctcccccgccctcggtacctgagggatggaaagcgcagtatgacgatcgataccagacttggtatgtatttatccatcttaacgaagtccaaaatactgacaatcagccaggtattatgtggaccttgcaacgggcaaatcgcaatgggaccgccctgaagctcccccatcgcgcggtgacgccagtcttccaaccgattctctcccgccatcgtacagcaattcagggcctggcaacccagcagcaatagccggtgtgggagacaagaagcaacccatgggatcgaacaacccctataacccttcaacaaacactagcccaggcaacgccagccctcacacaatcgacgaagacgcacgacttgccgccaagctccaagctgaggaagacgctcgggctggcatacgaggaaccggagccggactggaagatcgtggcgcatcatcagactactacaacgatgcctcgcggccgcaatccaccgggccaggcggatatgcggccggcccagcgtcgcatagcccgatgcctgagaacgaaaagaagcgcagcaagggtggatttttcagcaagctgctgggcaagagttcgagctcaagcagcaggccgtctcggccacagcaacagtacgcctcgtatgcccagcaaggtcctccccctggtgcatactacggtggtggaggctatcctccgcaacataacccccagtttggatatggaccccccggaccgggatacggaggtggtggatattacccacagcaaccgccccgcagacaaggtgggggtatgggaactgccggtgctgctgctctgggtgttggtggtggtttgcttggcggtatgctgattgctgatgctattgatgaccatcatgacagcggtgattacggcggcggtgatgattatggtggtggtgatgacttcggaggaggtgacttcggaggaggtgacttcggaggaggggacttctgagctcggttgcgtttcgatttatttgattgttctgctctttttctccattggtttgttactaggatggacttcgggatatgggacaggcccgtgtacagctcgagggacttataggcgctctggtatcgggagggatctgggggcattgcttttgtttcgcctaaacagctctagccatttatcggcatttggctccagctttatgagccatgagcagcttcagttaattttgtatcatacaatcagccacgaaacaatgacaagataccatgtcaagaacggtcaatataaggaagtgatgatcttctatccgcgcctccgggcaggaccactggtatctcgaccggttgaaccagcctgggccgcattgttggtcgtgggattaggaccaccagtgcccgccatccagctggccagatcaaacccgccaccagccatggcattggaagtggcgccggtgatgggtgaggagcgagaatgttgctcaaattcggcgcgcatctcgggatccactaggcaacagggttaggcacaaagatcggttaggatgaaggggaagagacatactgttctccatgagcttgggcatgacaaacatgagacccagcgcgacaaccgcaagtaacaccatcgggttcttgacaagactcaatggagagactgcgattcaatccatcattaacacaactgaagacatttactgcaggttgcatctgcgggagaagggaagcttacattgcgcgcgctgctcataaaagaccttccgtcccaggaccttggcctccacaaccacatcaatctgcttctttccagcaatatccacgatgtatttatctgccccacggttatcccacgagttcccgcgaaaagtctcccagataccgagaattgatccatcagccgcaacatcgacacggtaaggggcgaagacgtagtcgccagcagagcggatatcgagcaagtaggactcgggctgagcatctggaccggagtatggaagatcatggaacacaaatgttgccgagcgggtcagtgatgcggacaggatgtgatctttcccaccagaggggagactagtgagagtggcatggctggttgcggggaggacatgtgggtttgggaggggactagaggcaggaatggtgattgtcaaagagctggcagataccagactgctaatccctaacaggacaagagaggagagcgagaaatgcatggcggagatgtgttgttgaggaagacatgggggcatgaactgatcagcaagcagttccgcatcacgtgatgtgtctcttctctccagctcttggatgtacgagcatcttgaatcgccaaaaccacccgtctttgttttccaagacacagagcatcatgcctgtctaccttatctccaggtacaaagaaagactttctaaaagttcgtttccgacaagagacacaccgttctaacgtcaatttgaataggatcgcggatcccctcttcgccctggctatgggtgtctctgctgccctcacccgcattcgccgtgaccagcgcgaacagcaccccgaccgcgcatcagaaatcacatacggaagcatcgtacaaacgagcggccatcggttacagcggtggtggaacggagacttccaggatgtttaaacagaaccttgcgctatatcatcgatttggagttttggtttgggaggttctcgccgagaactaatattggttgttgagtcttgtattccgtgttctatttgtacatatctacaaaagttggtaatagcatggaatgatggaatggtcactctataggcaccgggaggatgcaattttcgtatagtttcagtcctaagtgtggatggcccgaaggtccgaacgagggctgtttggattctcttatgatctacgatgtacagaaagaggggtttttttttttttttttttttttgaattagaaagaattttgattcactaggctttttttttccctagaaaaagagataaccttgtatctatgcaatcatgcgcaaaaggaaaccttgataccccataagttcgtaaaacaagacgtgaaaggaaacgagtgccaaatggcaaataatcaagaatcattcagagcgaaacatttagtcaagctcctcgggcttctcctcgacctcgtcagcggagcgggcaccctcgggggcaccagcgccagggggagcctggccgccgtaggcagcggagatgatggggttggcaacagcctcaagctccttctgctgagactcgtactcgtccttctcagcagtctggttgctgtcgagccagccgatgacctcgctgatcttgtcctcgaccttcttcttgtcatcgtcggagatctggagcttgccctcagaaagagtgttcttgagggagtaggcgtaggactcaagaccgttcttggcctgaatacgggcagcctcagcctcatcctcctccttgtacttctcagcctcggaaagcatgcgctcgatctcctccttggagagacggcccttgtcgttggtgatggtaatcttgttagactttccggtacccttctcgagagcggagacgttcatgataccgttggcatcaacatcaaaggtgacctcaacctggggaacaccacggggagcggggggaatgccagtaagctcgaactttccgaggaggttgttgtccttggtgcgagcacgctcaccctcgaagacctggatcaggacaccgggctggttgtcggagtaggtggagaaggtctcggacttcttggtggggatagtggtgttgcgcttaatcaaaggagtcatgacaccaccagcggtctcaataccgagggaaagaggagcgacatcgagaagcaggatctcgttggtggacttggaagactggtcaccggacaggatagcggcctggacggcggcaccgtaggcaacggcctcatcggggttgatggacttgttggcgtccttgttgaagaagtcggagacgagcttctggatcttggggatacgggtggaaccaccgacaaggacgatctcgtggacggaggacttgtcaatcttggcgtcacggaggacacgctcaacgggctccatggtgccgcggaagagatcctggcagagctcttcgaaacgggcacgggtgatggaggtgtagaagtcaacaccctcgaagagagagtcgatctcgatagaggtctgggcagcggaagagagggtgcgcttggcacgctcgcaagcggtgcggagacgacggagagcacgggcgttggtggtcagatccttcttgtgcttgcgcttgaactcgttgacgaagtggttgaccagacggttgtcgaagtcctcaccacccaagtgggtgtcaccagcagtggccttaacctcgaagataccctcctcgatggtcagaagagaaacatcgaaagtaccaccaccgagatcgaagatcagaacgttgcgctcaccctcgaccttcttgtcaagaccgtatgcaatggcagcggcggtgggctcgttaatgatacggaggacgttgagaccggcaatgagaccggcgtccttggtagcctgacgctgagagtcgttgaagtaggcagggacagtaatgacagcattgttgacggtgccaccgaggtaagcctcagcggtctcacgcatcttgacgaggatcatagcagagatctcctcaggggtgaactgcttggcctcacccttgaactcaacctcgatgacgggcttggtagccttctcgatgatcttgaaaggccagtgcttcatatcggcctgaacctcagcgtcgttaaaacggcgaccaatgagacgcttggcatcgaagacagtgttgtgggggttcatggcgacttggttcttggcggcatcaccgatgagacgctcggtgtcggtgaaaccgacgaacgagggggtggtgcggttaccctggtcgttggcaatgatttcaatgcggtcgtcacggaagacacccacacaggagtaggtggttcccagatcaataccgacggcgggagccatggtgaatgtgtgtaatcgttaaaaaaaagaaaagaaaaggtagaaagagattcgtgaggcaagaggtaggtagtgtacaaagagtcaaagggtattttgatgagagaaggaaagaagaagaggaaaaggacgagggctgagaaaagctcctatatagtgagcggtgtattactccagaagcttctagagggaggcttccatagggatccatgagattccatgagcttcgatggcccagcaaccacatcattacgtccttcatcaagactttagtaggttccagatgagcctagtggagtcgtcaagtctacaaattacttgattgtctataaactccttatcgacgatgtcaattcctcctttttttcactccgattcatgttcttcttcgacgttctcagctttttttatggcggggctgtatgatgtaatagtgggatgacccttaaggcggtgtcaaatatgatattaatacaggatgaatactggtcaccatgggagaccgtatgattatatgttttgggttgtcttggggtgaaggtattattggtaatggtatggtcagttatgtatgcgtcatagtgagttcatgaccatttgaaatctgctgactaacttcggatgggtgtttttccggaaatacatagtatattatataatcatagctgcctaaggttcccatggaaccttccacggcttttctttccacatccatcatatccatcacctatctatctaggtatctacctaggcatgcaggtaacatttatagatggctaaattctcacactttcttaaaaggtcaattcagactatctttcagtctcaccgaggtattaacttgaatgatctagctacatgcttatacaacataaagaacttaataaagaacttaagaacctgtgtctcatctagccatatcatgtagaatagtaaacatgggaaccctctaattccccttccaagagcctgatgtgtatcctacctacggagtgcggagtacacagtacagagagagagttatggagtaggaacatctgtgatctatcccgttctaaacaaatcggagttactccggagaaactacagttgcctcatatttcttattcttcctaagccttagaaaggctgggccaagaagccttgcgccatccgcgctaagcatttctccttacccttgtagatgtaacatgcacaggtggcatttcctatccaatcgggaattccttctttatctctttaggattgcgaatatttaccccagtcgcacatcatgagacatttttaaagtagatttagttttgagataatatatttcatgggctatcgtatctcattaggattcctctggattcttctgaatcctcttcgacatgttcactgcattgaagagtaagaggcccgaggaccaattcgaggtcaaaatagatcaagggactatgggctcagagggtctagagttcccttctaaaagcccaaatgtggcggacaccgcagtggacgaagaaagcctccatttcaagggggaaacagccgccattgaacaagagacacacgataaccccgagattgctgcattgcccttgtccgtgagacaactgatcaacctgaccgatgaccccaacttaccgacgatcacctttcgttactttgtgctctcgatcatctttgttatccctggagcctttttgtcgcaaatgagttacttccgcacaacgaaggcaccatactccatcttctttgttcaaatagcctgtcactatgccggtcactttatggccagagtctttccggactggaagattggactacctggcactcgcttttcttttagcctgaacccggccccatggagcatcaaggagcatgtcttggtcacactgactgcagcttctggagctacgtacaatctgggatatgctcctatcgtcctagcagagctttggtacggtacacgagtcaatccggcggttgcaatcttcttcatgctttcgatcgtatggattggctactcctttgctgctcttgcccgtcagatccttttgcctgacccggagtacatctggccccaggctttgatgcagacaacattgttcgagactttccgcaaaacagacacctcgtcggctctcgctcggcgccagatgaaggtgttcttctttgcgcttctagggatgaccatgtggcaattccttccagagtatgttttcccgttcgcctcatctttggccttcctatgttgggtagcacctcgcaatccggtggccaacttcattggctcaggcattggtggaatgggcttcctcaatctctcgttggactggtcaaacgtgaattggaatggatcctctatcatgacgaccccatactggactcaggtcatcttgttcttggcctttgctttcaattgttgggtcctacttcctgcagcaaagtgggggaatctaggttctttcaagcatggactcatgtcaaatagccttttcctgggaaatggtacaacctacccgaccctcgatgtactcaccccggactatcatctgaacatgaccgcttatgaggagtatgggccgatgtatatggggttgcaaaatgtatgggcgacatttttcgactacgccaaacttccagcagcggtcacttggatcttgacatttggatacgcacaggtttccgggaatgcccgaaggatctggtcgtctcgcaaggcagagaaatccacgaagagtgaaagcattcatcaccagtatcacgaccgtctcaacgttatccagagacagtacaaagagattccatggtggtggtatgctattctattctccgtagcctttatcattctgattgtattccttgcactcggacatctcttcatcccgatctggacgttgtttgtggcacttgcgagtgctgccatcctggtcatcccttttgcttggctttacgccatttccaactaccagcttgagacgggctctttcaacgaactcatgtacggctacatggtccatacaaaagccggagaggcccaccaacacccctgtggcccttctgtctatgggtctattgcgggtgacgcctggtatcgtgcgcagtatatgctccaggaccaaaagatcggtcactacatgcacattccgccccgcacggttttcttctctcaagttttcggcacttgtatgggtgttccaatcaactatgctgtcattcgttggatcatggacaccaaaggagattatttgactggtaaaaaaatggacccattaaatcaatggacagggcagtccttgcggacttcaaacacaatgggagttcagtacgctgtgcttggtccaaagaggctttttgctgagacagaaatggccgtgcttccctggtcattccttataggggcagccattcctcccattctcttctgtttccaccgattcttccctcagcttcgaattgacctgtggaatgtcagtatcttctttgggggactggcgatgttctatggtaacatcagtactggttacacatctgccattattggtgggtatgttgtaatgtattgggcttatcgtcgccatttcgaggtttggaagcggtacaattacttacttgctgctgcgtttgatgctggatttaatctcaacatgttgctggtcttcttctttttcggagcaggcaagcaaatttcgatgccaaaatggtggggcaatgatgcaacgtctgtggaaagatgttttgctcttgaaagctgatttactttcatgattcagtaaaggaatagctgatattatgcgttataatatgaaatttatgaaagttgcctcttcacacttcacaaatgcagacaaaggtagcgtactagtatgttgtaatattgctgatgcctggggttatcacttgcctatagaaccaagttagatagcttttatatatttgcttactttacttctttcaattcattttcagttcgtttccggttggcacttgtacttggtgcctcagggcaagatctgtcacggggtttgatcacccgcgatagccaatcagacggtgagatcgcccttgcaggttgttttggttcgagggggaggaccttactttgcagaccgtcttttaaatttcccttgccccctttccaccaaccatccttcctacaattctccatccactctaactaaacctcatcatggctgaccagacgactatttccaaccccaacgaggaagccttcgccaagggcaagggcaaggctgaccccacgcaagatatgagcatggatgaggagagcgagtctgagagcgagaacgagatcgtgagtctacagtttccacgcccaaccaattccttttatgctgacttcctcgcgcgttactaggctgacaatggtgtgtacccccctccccccccccccaacgatcacccaagcaaccatgtctgaatggccacatgcttcagaatgaccgtcgattgacttcatactgaccctttctgttcctagatgaggatgaagacacacaagacaacctcaacgaccccatcgaccagagcaacatcatccagggtggccgacgcacacgcggcaaggtcattgactactccaagatctccaccgatgagatggaggatgacgaggaggatgacgaggaataccagagccgtgaggacaacgagaccaacgatgatgatcagatgcgcgactaagctcgatgaatacaaaacttccgggtggcatggaattgctttgaacgataggcgccacggatcggtctccacgatgtttttctttcgcgtgtgtccataacatgtctcacgattgtgtgatggcaatgaatcaatgaatatctcttcggttctctgttcctaaacccgttaatatacacctagtccattatggattggccgatgcctatgggttcagcctatgatgatgtaatttgtagagctaatggatatccacagcttggaatgggcaacgcatcattgcccattgtattccaccataatcaatcctacctgacctaatcgagaataaacagaatcccacatgaaccacaactgctgtgtatcccgcatgtcgattctagaacttggtctatcacgtgctgttctgctgttcggcgaataacaacgctatggccaccttgatgtttttagctccgcaagcatcgaggacttgaacagtgatcgccttggattttgaccttttaccaaatgccccattgctgctgaacaacttatccacctgcagtttatgttcctcctctccctcccgtcgcgaactctagctacattccacgaccgccatggcttcacggtatagttccaccatcaatatctcggttcattataaggtcgccttcagctagctaatgcagcagtaatcgaaatagatttccgcgtcaacgtgatccccgcgcctcttcgtctctcttcgatcaatacggtggcgactctcgccaagctagcagatcgcctgcccaacaacctggtggatacgggtatgggggctactccagtccagcacctaatggttacgcgagtagcggtgcagctggagcgggatatcaaagtgcatcgcctgacaaaaagtgcgttgagtggctcatgatcttttgaggtcttccgtcgttcttccgaggaaggatgtgtagttgctaaccaagtctttgttatagggggcactactccgatgcagttctctcatctctcgagtcacagaatgacgctgaagttgagggtatcagtgccaaggtcaaaatgttgaagaatgtaagaagcctgcaccccaaatctccagacccagcaaaagcaggtggtcgtttaatggcaaccgctgacaggaaaaccatctagatcacactcgcaattggcgatgaaatccgagacacctcccacatcaccgacctcaacgattcattcgacaacacccgagtccgactccgcgggaatatgaaccgcatgcttcgcatggccgacagcaccggcatcggctggcgagtttggctcggcttctttttcgccgtcttcctcctgttcttctatgtatgggtattttgaacgtatacccttgctgtctctcgaagacgtgcacttgcgttctatactatgtcgtccacgcccgcctttttcgtctttatcatctttaatctctcgtcttacttcacgcaaaacccagcgactttctcttttgctttttctcgtatggatcgaaccacgcgcatgacttatcagtatcttcagcatggggatcttggctttggtgctatgaggtgttctgggagtatggattctttgagccatgtatatgaaaacctcttccattggctcagatgtcggccacgtaccgctttctgggttggcacgttggagatcttcctggcatccatctccggagataatccaggaaggatgtccgatgtgatccggtgatggttaggttatttctgggttggtattggaagatgttttaagaaaactgtacatagtgcatttaaacaacatacagggactatcctgacaaaagaaaccatttataggtcaagctttgattcccctggctgtgtttacctcaaaacgtgtttgaagtcatgttcattgaatcttcttataaggaggtatcgtaagctgctatcaaaactccgaggcagaccccctaggtctatctttttaacctgacacgaaaacgccgtagatgataccgaacaagtctaacatcattttggatagcttcgctagttcagactatccctaggccctccgatgtggcgcgggaaccttctggcaaacccgcttcgtcgactgccctgactcgttatggacgcgcgcaggtcttcgtcgctgtaaagcatgctgctggaatccaacgcatcgccaccaccgctccagcgattgaggaaacggcgttgggcttcagtctcgggctcgcggcgcaaagttggaggtggaggcaagccacgactgtttggcgtgctggtgcggaagttctccgcaaacctggtttggataatactgggttcgttttcatcgtcctcatcactcagctcctcttcgctgtccgtgtgctgccattccccttcttgctccgaaccttgctctgcagcatctgggatatcatggtcgaggtcgcgcgtcatgtcttcactcacactgtcaccgtcggcggcaggtatctccgcatccagatcaggctggttgtcgaaatcgtcctcttcttcgtcatacaggcctgagcccccatagtcatcatcggggaaaccttcagggatgtcatcatccaagtcgcgctccatatatgacccttcatctccaatgtcatcttcctcaagcccttcttcgccttcctcgataagacccgaggcctcctcctccgcgttggggatatcgtcatccaaatcacgttccatgccttcatcctcttctacttcctctctctgcatccctatgtcatcatccataattccttctccctctgcagcctccatctcagccgcggcagcctgtagcgcctcttcgcgctccgcttcctcctctttcataccgagcattgtcttcgcacaccccgccggtttgatccatgagtatccaaacgacgcgatgttcaattttcgagcgcgtagtgagcgttcttctgcggccaatgtggcaattgtgttggcagaagagcgggatggcatgaatgagcgattactgctggacgacgtgccggcattgcgtcgggcgaggtggtttgcagcggaattgtcgccagcttgttgatcggaggtagagcgatatggttgagaggatccgaaccagagttcgtgggactatcaagttgttaatttcctcgagggctggtttgagatgcgccagcacctacgtcgcgcggggtgatggatgaaagggtgagcatcactgcaatgattgtttcaatatcacatttgggaataccctgcctatattgtatgccagggtttctgtttatggagctttgtggggatgtccctgcgatttggagatacggcgggttgtagcggtacaaagtagcagtttgtttatggtgtggggcgaggagtggctaccgggtactaggacttcacccgtgtgagctttgatgaaaggaagaagatatagagaagcaattggagatgtcaagggcgttataacccaaccttggaaagatccaacggggaaagcgcgcagaaaaggctggagctccacagccaatcaattttcatctatgcggggggaatcctaactacttccatacctacctatgttgtaggtacctacctaggtagctaagcatcatgtataaaaaaggctctttcaagtagtttggaggttaattatattccgcatagtatcttctattaacattggaaatgtctatagctttaaacagcattctatattatatgggtcgaagggatcaggttgaatttcatctttgaacaatgaagtgtctagttttagcttcaaggcaaattagcaatgctctcaccgttgtactccgtacttcgagagcagatcccagtgaatgatggtgccaggctttcattaatccaggcccttacatagctacagacactgcatatgtacgccgtcctacaatgcataagtctaggaccagtggagatgtgagtttaggtctcagctaaatgattactgcctgagacctacttcgtacaagacaagacctgaatacaggaagtgagatgctgcttcatcgttattcccactgcgatgccctagagaaatttcaatgtagttctaagatattaccgtgaatctaaaattgagtattagttaaagtagaatcttgagtttcaaaataaggaggtatggagcatacggagtacagagtaagtagttaatggagcgctcaacattccagccaatgtctacaacataaagttgtggatatttccgaaactacccgataccagcaactcggtgaacttaaggacaggaggacaggaggaaaaagccgggtgtttcgaaatttgaaaaagaaaatgaatggcgtctgactttcatgtgcactttcactggacgcagaaaaggtggggatcatgtgatatccactctggggttatgaacacgggtacggagtacattggacatactactatgtggtatgtagtatgttgtatgttgtaggtaacagatgtatacaatgcagcttagaagatggtgtatatgagccattgaaaaaaagaggaacatgatgcggagaatactggtcctgtttcacccgatcgtgatatcaatgtatattgtaatgggctgacacacccgtggactcgtatacgatgtagacagccaggcgaaaagaggagaagagatccttagagagatcagagttatgtattctaattatcatcttctaactagttaccttatctctagatcttcgcatgtctggacggatcactttcctccggactcttaactctttcaatttatccctacaaagcatatttctggaatgtaaaatatggggaaacatgatcaattagcagatgaattcccatattctcgggggcactatgaatgcctagtcaacaggccattatggaacaataaggcagttggggtgaccttaaaagaatgagctgaaatggtcatccgcaaacggctcagggcccgaaatcgggctagctacgttcattggcatctccaaagtaaggtgagagggaaaacccgggatggacttggccgttgtcggaatgtgtcgttaccgttacaggtatttatgcattttaatggatcaattgatgtctttaccccttggaacaatttcctacttgttattttctttccgtattcctcttttttgtgtataaacttgaatcctttttatttagattggtacttttcgagtaagttttttagtacttttgctttcggttctcctacagaaaacgcaaaccagcggctcgaaatcaaatggattaagcacatctttgccccactagggagcgcgcccattcacccgggttaacatgtgaggattgtccttattcttggggagtacggaggacggagtacattggatgcactttgaatatgtccaatgagcagctctgatccttttatgggcctatggggcctatgggacccactagaccttgtctttgagcttttagagagaagaggaaatgataagtataatgaatatgaatatataaagtagtatggagtagtggtagttttcaatatatgaatatattgatatactaatatacgaggttatattgatatatactaatatccctaggtagtatatagttatagttagtatagttatgtataactagagtccccacgaaagttagttgacgtagtaaagagctaagggtcgtaaaatcttcactctgattggtcgagcgatgcttatcttgggatgatttgcactccgtaatcataatgattatcgattatcattactttggctctttgggctgtttccgtcgattttgtcttttcatatggttaaaacgtgcgttcagaactaaatggtatgctgtatgagcatgtgtatgtaatgtatagtgtatagtgtataatgtataatgtatcgtgtagcacatatttcactcttatttctttcacttgacctccccttaccgttctcttggctgctttctaacaatttgccacggtagactcccccaccattgtaattttcccttttgggctacatcgggagcttgcaatccccggacctgctgtcccgccgtaatcgcccatccttttttctcccctctccctctccctctcccctccttttttctctgtttctctgtttctcctttcaccttttccctcttcgatcttcaactctttcgcagaagctgggtgatcattgacacatttcttcctccttcgcgccacgacttcctgtgacgacatcaccagctgtcaatccccaaatcgggtgggtcttcttagcaacaatccccttcagttaccattccattctctgtcggctcccggcggaagaatgggtcttaacttggaggagctctatggcaaagatataagtgaagaacaggctcctcatgagtattctcagtaccaacccgaaaagggttatggctgggccaatgctctgccagagcggcaaggtctgtacgatcctgaatatgagaaggatgcctgtggtgtaggcttcgcagcgtgagtgaaattttctaagactgtgccccctctccccctcctttctcccccaattggaggcatgaagacgaactcaattctgacgagacaacccagtcacatcaagggaaagccaagccacaagattgttagcgatggtgagtgccagttttctgccctttgaggaacgacaccagaacaagtgaagctgatggcaattgaacagcccgcaatctgctgtgcaacatgacccaccgaggagccgttggctctgatgcacgggatggtgacggtgctggtgtgatgaccagtattccacacaaattctttattaaaaacttcgcccgtgaggtgggtgtggatctccctccattgggacaatatgctgttggcaacttgttcttcaagcccgacgaggaagctctcaagcagtccatagtggattttgaggaactggccacgacgcttggcttgcgtgttcttggatggcgtgaagtgccacgggactcaactattctcggtcctgcagcactatctcgagagcccattgttatgcagccatttgtggtcttgaaatcggcatacggtgaaggcaacaagccagagatcactgacactgaaaagttcgacgagagaacctttgagcttcagctgtacgttctacgaaagcgtgctactcatgtcatcggcctcggaaactggttctacctctgctctctcagcaaccggaacatcgtctacaagggtcaactctctcccgtccaagtgtacacgtactaccacgatttggtgaacgtagactacgagggccactttgccctagtgcactcccggttctctacaaatacgttcccatcctgggatcgtgcccaacctctgcgatgggctgcccataacggtgaaatcaacaccctgcgaggaaataaaaactggatgcgcgcacgagaaggtgtcctgcggtcagaggtctttggtgacgagcttgacaagctttaccccattgttgaggatggcggttccgactcagctgcgttcgataacgtgcttgaactactcatgataaacggcgttctgtctctgccggaggcagtgatgattatgattcccgaggcctggcaagacaaccccgccatggatccagccaagtccgctttctacgagtgggctgcctgtcagatggaaccttgggatggcccagctcttttcactttctccgatggacgttattgcggtgccaatcttgaccgtaacggtctccgtccctgccgtttctacgtaatggacgatgaccgcatcgtctgtgcttccgaggtcggcgctattgatattgatcccgagagggtcgttcagaagggccgcttgcagcctggaaagatgctgctggttgataccgtggctgggcggatcattgatgacgctgagctcaagcagactgttgcccgccgccaggactttgccggctggctggacaaggggcttctacagctccctgctatcaataagttgctacttgactcgaacgtcgatctttctttcgccttggacaacaacactattcagaacgacccccgcctccgagtgttcgggtactcgtttgaacaagtcagcttgattcttggccctatggctgcagactccaaggaagctttgggctctatgggtaatgatgcacctctcgcctgtattgcccttcagcctcgcctactctacgaatacttccgtcagctctttgctcaggtcaccaaccctcccattgaccctatcagggaggctgtggttatgtctctcgaatgttacgtcggtcctcagggaaacctgctggaaatggacccttcgcaatgtcaccgcctgcgtcttccctctcccatcctgagcattcccgagttcaatgctttgaagaatatcaacatagcccacaacgattggaccgtgcgaactatcgatatcacatttgaaaagagcaagggcacggctggttatattgaagcgctcgattccatctgcgatggtgccactgaagctatccagaatggcgataaggtcatcattctctccgaccgtgctacatccgccgaccgtgttccagtctctgccttgttggctaccggtctggtgcatcaccatctcgtccgaaacaagtggaggtcacttgcggccctggcagttgaaaccgctgaggctcgcgaggtccaccaccactgtgtcctgctgggatatggtgccgatgccatcaacccttatctggctctggaatgtattctcaagatgaatcgggaaaacttgatccgcaaggacatccccgatgagaaggttgttcagaactacaagtcatcctgtgatggtggtatcctcaaggtcatgagtaagatgggtatctctactctccagtcctacaagggtgcccagattttcgaagcccttggcattgacgacagcgttatcgatcgttgcttctccggtactgccagtcgcatccgtggtatcacctttgatctgattgcccaggatgccttcgccttccatgagcgcggttatccttcccgtccgatcgtcgaagtccccggtctacccgaatccggcgagtaccactggcgtgatggaggagaggcccatatcaacgatcccaccagtattgcaaacgtgcaggatgccgttcgcaccaagaacgacaagtcctacgaggcgtacgccaagtccgcacatgagcagatcaagaactgtactttgcgtggaatgttggacttcgattttgatcagcgtacgcctattcccattgaccaggttgagccttggaccgaaattgtccgccgcttcgtgacaggtgccatgtcctacggatccatctctatggaatcccactctacacttgccattgccatgaatcgcctgggcggcaagtcgaacactggcgagggtggtgaagatgccgagcgtagcaagaggatggagaacggcgacacgatgcggtccgccatcaagcagattgcttctggtcgtttcggtgtgacatcgaactacctcgccgacgctgacgaactgcagatcaagatggcccagggtgccaagcccggtgagggtggtgaattacccggccacaaggttgtcggccccattgctcgcactcgattctccaccccaggagtcggtcttatctccccgcctccgcaccacgacatctactccattgaagatctaaagcagcttatctacgatctcaagtgctctaacccccgatctcgtgtttccgtcaagctggtatccgaggttggtgttggtattgtcgcttctggtgtggccaaggccaaggctgatcacatcttgatctctggtcatgatggtggcaccggtgcctcacgctggaccggtatcaagtatgccggtcttccttgggaactgggtcttgcagagactcatcaaactctggttttgaacgatcttcgtggtcgtgttgtggtccagactgatggccaaattcgtaccggccgtgaccttgccatcgcctgcctgctcggagcggaagaatatgggtttgccacaacccctctgattgcattgggatgcattatgatgagagtgagtaccttcagtctctgatttcctgatgagaccagcctattgacaaatatattttccctagaaatgtcacctgaatacctgccctgttggtatcgcgactcaggatcccgaactgaggcagaaattcaagggtacaccggagcatgttattaacttcttctactatgttgccaacgagatgcgtgctatcatggccaggctgggcattcgttcggtcaacgagatggtcggtcgtgctgagctgcttaaggtccgggacgatattcgtaatgttaagcaggaacggattgacctatcactcatcctgaccccggctcactcacttcgccctggagtagctacctacaatgttcgcaagcaagatcaccgccttcacacccgcttggacaacaagttgattgctgaatcggagctcgctcttgagaagggtctaccctgccgaattgaatgcgatatcgttaatactgaccgtgctctgggtgctactctctcctatcagatcagcagacgttatggcgaagctggtcttcctcaggataccatccacgcgaacattaagggctctgctggtcagtcctttggtgccttccttgcccccggtgtcacccttgagctggaaggtgatgccaacgactatgttggcaagggtctctctggtggccgcctcatcgtctacccctcgcgcggagccgctttcaaggccgaagaaaacgtcatcgtcggtaacacttgtctttacggtgccacccgcggaacttgctacttccgtggcatggctgctgagcgttttgctgtccgtaactctggtgccactgtcgtcgttgagggtgttggtgaccacggatgtgagtacatgactggtggtcgtgtactaaacctcggacccactggccgcaacttcgctgctggtatgtctggtggtattgcctacgtcctggataagaaccaggacttccattctaaagtcaacttggagatggttgaaatctctagtatcgaggacccgtcggagattgcctttgttcgcggtttggttgaagaccaccatcactacactggctctgagttggctgctcgcatcctgctcgactttactcgtgctctcccccacttcgtcaaggttctgccgaccgactacaagcgcgtcatggaggaagaggctgccaaggcggaggctgccaagaaagctgaattcactcttcctcagcttcccagcatccctgttaaagccgagagggccgaggccgatcattccaagaagactgacttgctggacattgaagacagcattagcgattcgaaggctgagaaaaagcgatccgcattgatcttggacaaaacaagaggtttcatgaagtacagccgccgcagtgagaagtatcgcaacgcaacaacccgtactcgtgactggggcgaaatctcccaccgcctcagcgaggacgagctcaagtaccagtctgcccgttgtatggactgtggtgttccattctgccagtcggacactggctgccctatttccaacatcattcccaagtggaacgagttggtattttccaactcatggcaggatgctttgaaccgtctgctcatgaccaacaacttccccgagttcaccgggcgtgtctgccctgcaccctgcgaaggatcctgtgttctaggcattaacgaagaccccgttggtatcaaatccatcgagtgcgcgatcattgaccgtggattcgagatgggctggatggttccctgcccccctaagacccgctctggcaagatcgttgctatcatcggctctgggcctgcgggcttggctgctgctgatcagcttaaccgcgctggtcacagcgtcaccgtttatgagcgtgccgaccgaatgggtggtcttctcatgtatggtatccccaacatgaagcttgacaagaaggttgtccagcgccgtatcgacctcatggccgctgaaggtatcaagttcgttgcgggcactgctgtgggccctgactgtgaggtttctctgcagtctcttcgtgccaccaatgatgctgttattgttgccactggtgccactgttgcgcgtgatctcaaggtcactggtcgtgaattggatggcgtgcactttgcaatgcagttcttgcataagaacaccaagtcccttctcgactctggtctttcggatggcgaatacatctctgccaaggacaagcacgtggtcgtcattggtggtggcgataccggcaatgattgtattggtacctctgtccgccatggtgccaaatcggtgaccaacttcgagttgttgccccagcctcccccagagcgtgcccgtgacaatccctggcctcagtggccccgtatctaccgtgtcgattatggtcacactgaggtcaagacgcatatgggcaaggacccacgcgagtactgtgtcatgtcgaccgagttcgtcgacgatggaaacaaccgcgtcaagggtatcaacactgtccgggttgagtggaccaagagcgctaccggcggctgggacatgaagaccctcgagggcagcgagcaattcttccccgctgaccttgtgctcctctctatgggattcttgggtcccgaggatcgtgtatttggcgatgagattgagcttgatcctcgcaagaacatcaagacccctcccggccactactcgaccaacattcccggcgtctatgccgcaggtgactgccgccgtggacagtctttgattgtctggtgagttttcgtccaatccttataattagcaactcactaatataatttcaggggtattaatgaaggtcgccagtgtgctcgcgaagtggacactttcctcagcggaaccagctcccagctcccagtcacgggtggtatcgtccgtcgccctgccatcgactccgttccccaacccactgaggttgctgcttaatctagcggcgatgcaggacatgttttacgacgctgacggccattatcatgataaaattttcatttcgacgcgggaaagttaatcaaatgggataaacttgtggcatatacaggattccatggggttggttctccgcgcgaatgaaaaagcctacaatactgcgctttcttgagttttgctttctactttctactttccatttttatttctttgattttcatcttatgttttgcttcagcgtcatttttctttgccttttcagggtctgcaaggtgtttagagcgtctgccattcggtgatctctctatttctgctgtacatagcttttctgcaaatctgactatgttccatcattgtttcaaattcgtctataaagtggaatgcctcgttttctttgagtatcttttatgtctttgtgtgaaagaacgaaggacaaagacctaaagagtcaacaatgtctttatgcttctttctttggcaacttcccgttgttagactgtgcatggccggctttgatggctaacctatataaccgcccaaatatcccttgctttttcggaccgttccattccattcattcatttcaactaatccagcttacctatttcacagatttacaggtcctatccatctcaaacatgggcaacgaagccaataagacagccacggctgcgaacgatctcaatcccaacggcttcatcactgagcgcgaggtcgacggcgagcggcgttctgtccgccggtataatgatggtcgagtatctgggcgcggtgggagtatcgagggtacccgccagggctcccgaaagaactccacagggatcagcggtcgcgccaggcctcccacctctcaccctagggatctggactgtcgatctactcctgctgcgtccggtccatccgatgtcgctgatatcactgctgccatggccaagctcactgttgaccatcccactagccctaaggtaaagaaactcagcaagaagttgaacctcgatgccgatccggggattgagactgtgaccctgcaaaaggtcactgcttcacctacgcctagtgtggcttcctctacgtgcagcgcgggcagcaagagttctgtcaatgctaggatagcggaaattgaagatcgagtaaggaagcacatcaagtcacgactccagactatcaaggaggaagatgaagagtaataaagaatgaagttcggaatgggctagagaatcggagaacatcatttacctgccttccattgaattgctggatgctaacttcttaaatcattcctaacaataggtcttacaggcttgcttcgcagttgagcttttatatatgcacggctacttacagcttcccagtctatgcccaatgccatgaatggatatgaggtaggcacgttttgagtttcctctttgatatcccgaaacatgtctcttgtgtctatgggcttaaagatctttgctaactcttctggttattaggtcattcatttatgcgttcttcaagcatctcttgtggagttctgagtcaatcaatctatttcagcatcattctctccctccagtagaatttcatagatcgtgggacatagttgtaaaacccgtgtgaagtcagatttgagaaatactgagcatataagaccataatgtgtaaaaagaaatagcctctaaagtgctatatgcgaattcgcggggtcctccatacgaccatttaacaaacgccgatacacaggggaaatggagagtatcgtattatacaagagtaaatgaaacaagagggtgtatatctacatatcgtaacaagaaaaggagaaacaagggacatcatgaaaccgccttttccgcctgttgtttcgctgcttcatcttcagccttcatctcctcccacattgcggcaaaatctcccttgaacgagtctttggctggatctagccgcacgtcccagacatcctcactgctggggcctgtcttgtacttaatcgccttctttcggttgtggtctcggatctctctcctgcgcaaatcttctggccaagttcgtgtcttcatgcacagccatagattatcccagtgatcgctgcatgaccgtagttccccatatcgataaacattcacaaattggcctccaaaagactggcaaaagaaggcgtaatcgaaggcattgcggcaggacatggtatcttggtagagggactcgggagagatgggtgatgaaggtgtttgggattccggagacaggttgccatcaggggtcagccctgttcgtttcgagagcgacgcatcctcagatctgagatctgccaggatttgattgaattccaagtcggcttgttcgtcgggggtcaaggtctttgatggtgcattctgctttgctggttccgtaggaattgtggatggagtatccttgggcatctccttaggagcttccttgggacctgatccccacagccagcccattttgtttttgcgagaggaaagaattggtggatctaccgcaacaccttgaaatcacgaggttatctttttttggtaatcaagatgtcatgtgactcatatacccaagtcacgaaccgacgtcattaatttggcaagtcgatttacacaacttgacttgtttcgctcttccaggctggtttctttactttctttttatattctttttccattggatatgtgtacgtgagcagaatgagatcgatacccgtatcaaaaggtccgttggccctttggtctccagcaggttctcatatcagcgccaatgggtcccgggggtggagacctccgctttggggacgctcgatacgatgcacatcttctatcagatcgggacatatttcagtaggagaaaatgaagggattatctatgtcaatagtgagcgccaattgattataagctatcatgcctactaactagctctagatatatttccgcaccggttacaatggctactgcggggtcctctcagccatattcagcctctcgaggggtttttggcacgagtaaacaacccagaactagcggcagctgaccccactcgtattgttcaacaagcttttccaagagacctaggtctggagatcaaggaggtcgtgacgagatacaaagagggaggtgcattcgtgaagtatgggcttaagtcggacatcagcaacgaaactatccaaaatgcaatcaaggagcatttgaaaaccaaccccattaagccctggtttaacccgaccctgaaagtcgatgcggaccttgttcgcggaacgccgtggatcgaagacctctatcgaatcccaagccaaaccctaaaggtggaattcttgccaacgtccccagataactcagcggcggaattaactcaagagtccctatactcactgttccggccttacggcaagcttctggacatccaaacacagccctcagattcgaaggtcgaaccacgctatgcaattctgcgatttgagcgccctcggttcgccgtgatggcaagaaactgcatgcatggatttattgtttcggaagaagcagggggtggcaactccggtacaaggttcaagatcaactacgagcgcaagatcaaactgtttatgatcaaggactggattttgaaccatccgagactagtgattcccgctatagctgctctgatagccactatcacggtaatcatcttcgatccaattcgcacgttcttcgtcacgctcaaaatcaagtcatcgttccaaagtgaagagaaccccgtgctgcggtgggttcgcaaacaagccagcaaagcgagcatgttcccattcgggaagcgaaagtcggacccgcgaggtctagcagctatctgggaagaccgacaaacagagattgcgcaactgcgagcctggttaacggagactgcggagaccttcattgttatccacggtccccggggctcagggaaacgcgagttggttctagagcaagctctgaaagagcacaagtataaagtcatcattgattgtaagcaaattcaagatgctcggggtgatacagccaagatttcacgagccgccgctcaggtcggctaccgaccgatcttctcttggatgaacagcatcagcagcttcattgaccttgctgcacagggaatgattggcactaaagctggcttctccgagacgctagatgcacagttaagcaagatttggcagaatactggtgtcgccatgaagcgagtcgccttggaaggtagacgaaaggaggacaaagatttcaacctgtccgaagacgaatacctggaggctcatcccgagacgagacctgtcgtagtaattgaaaattatctctatgatgcggacgacagtgtcgtgctcgacaaacttactgaatgggcggctggtttgacatcggcaaacatcgcccatgtcatctttttgacgactgatgcctctttcgcaaagccattgagcaaagccatgcctaatcaagtgttccgcacaatttccttgggtgactgctcgctcgaagttggtcgtcgtttcgtattgagtcatctagatgcagaggcaggcgatgacgatgaacagaatgcaaggcgcaaagagacgcttcgtggtttggattattgtatcaaggtgctgggtggtcgagttactgacttggagttcatggctcatcggattgaggctggagagacccctgaaggtaatcctaaccttttgttgcaccttgagaattcggttaaccgttgtatagctgccgtggaccgtatcattgaacaatcggcgtctgagattttgaagatcttcatccttgggacagagtcgactgcatctcaatggacccgtgagcaggcatggtacctcatcaagtctatcgccaattccaaggatggaagcctgttatatagcaaagtcctcctcggcgatgtattcaaggacaacggcgaggccactctccgggcactagagcaagcagagctcatctccattggaactgacaaaggattcccacgatacgtcaggccgggtaaacccgtgtatcgcgctgctttccagcgtttagttgcgaacaagaccctgcagggccgccttgatctgctaattctctcacagctcattggcaacgagaattcaagtatcaagaagtatgaggaggagctgcaggtccttggctcgctgccaaaacacccctgggagctagcttcacggattgagtggcttctgcgcaaagtccacggatcgcaatcgaagatcctcaagtacgagagtgaaagtgctgccttgtcaaagtatttgcagaaagagaattgagagtttaaccactgcgtatcgatctcatctcaatgccacattattattataaacacctcaaaatttaccagaggtatagatttgttgtcagagggaagtataaacgcgaaccagttgatatcaactttgatcccactattcatgttaatattttgagaacctctcataattatatagaaaggaatcgtagtttattttgggaatattgaaaatcaatgaaaatcaatgaaaatcagtgaaaatcaatgaaaatgaccaacttggaaaaataacaccccagaccatcgagcttagtaagctagaaaaagacaccggcctccgtttgccatcctgtccctttaccctttcacttggatatattaatctgaaaaaaaagatctttggagatcaatttcaatcgccatatccagtcatctctcctcgagcccttgagtgggtgttgacgctgtgttatcttacgtggcagggtttgttttgagcagcattgaattgatcacaaatggagaggtacggagccttgagtcttatacaggccgtccgtgagagatatttcggtataagttggtcaactgtttttgctgttgtggtgttcgtatgcatcacaacccggattatctcggggcttcagagtcgacctgatcgggattcaaaatcacagacggttcgagtagcaccgtattggtttccctggattggacatggccctgccttcttatggaatcatgttaccttctttgcaagagctcggttggtcttctactatattgtccttctacggtgcctgctaacaaggttatagagaatctatgaatgagcctgtctttggcatttacatgcgtggtgtgaaatacaatgctgtgacatctccatctatgatgaagactgttttctctgccaaagctgccacgccacacaaccaggtgctcggtcaagctctgcaaaacgtctttggcgaccgcagcctaatccgaaaaatggatttggatcgtaaccaaggagttagcgacaaggcttccaccattctcaacgaagaggatttcgtcactgaagcttcggctactattacccgtttggtgcagcgtgacatgtcgaacctggtgagcttctgccggagcattgttgaccaatgcccctgggagcgtggaatgagtggagttgaagttcccgaagaggaccagacagtctgcgaggccaatttgtttgcactcatgagcaatttcattggtcacatcatttctacttttctgatgggtgaggcctttgtggaaaatttccctaatctctcggaagatcttggaaaaatcgacgattgctttgtgacactcttcgccgggactcctcgccgggtcccgcatccagcggcttcagcaggacatgcggctagtgatcggcttcgccatatcttttcgatctttcaccgggcttttactgcttgggacgacgggattgacgccggcatcgagctacgtgatcttgacgatgtgtctgaactggtcaaagataggatgcggactttccgaaaattggaactatcgtcaggtgctagtgccgcagggcacttgtccctgtattatgatctgattgagcacacgactaagatcactttttggacaattactcatctcttcgccgaaccttcccttctcgatcaagtccgcaaggagatcacctcttacgtggtggcttctagaccaagtcgcgaggagacgggtttccccttcgatgagcctcctcgtctctccctggatattgaaaaggtgctcacatcttgcccgctgttcaaagcgtgttactacgagactgtacgtcttcattcagcagggatttcattcaagaagctggcgtcggatctgatactttccgagtcggcagaagaagccgcctatggtctgacggagccccgtacatacaagattgcaaagggcgaggatatcattgtaccccatggtgcttatcaccacgatgatcgatacttctcaaacccggagcagtatgatcccctacgatttctcgtgactgaccctgtaacgggaaaacaacgggctgatccaagtatcctcgctccctttgcggacgggttgtatgggtcgacaaacaatggatttaccgagcgagccatcttgactttcactgctggcattgtggccttgtgggatattgagcctacaaggggtgaattcctctcggttccagggcacaagactagctggggggctttccgaccgaccaaggagctgcgggtgaagatgaagttgagggtatagatatcattttatcattttgttatagagagcactgatcaatttaatttttattacacgacaggctcggataagtgtccgaatcggccttgcgccgatgacaccatccacgaagaggggaaaatatataagtcacctaatctaagctgtacctagttacctaggtaggtagttcctcgatctcgatagtgaattattcttcttcgggaacgaaaaatggaacagaatcctaaaaaggactacgatctcacaaacccaatcacttccacatctggacttcgccagggtctaacatcctatggagatgctcatttctccctctttctccgaaaagtgtttatcaaggcactcggatattcagaggatgcgctttcacgtccaatcgtgggcatcatcaacactttctcagggttcaatccctgccatgccaatgtgccccagctcattgaagctgccaagcgcggcgtgcaactcaatggaggactggcaatagaattccccaccattagtctggccgaatcattctcacatccgaccagtatgttcctgcgcaatcttatgagcatggatacggaggagatgatacgggcgcagccgttggatgcttgtataatgatcggcggtgagttccaatcgctctactctacagttgctttcctgtcatgtgagaatagccactgagagaacttaggctgtgataaaaccgttcctgctcagttgatgggtggcatctctgccaacaagccaatcctgccactgatcaccggtccaatgctgccaggaagccaccgcggtcagcgcattggagcctgcaccgattgccgaaacaactgggcggccttccgagcgggtgaaatcgacgttgaggaaatatccgccattaacgaagagcttgctccaaccgtatgtgcagacgggctttctgcagacccagggccatttagttcgctaatcacaatggttactcgtttagatagggacatgcggtgttatgggaactgctagtacaatggcttgtgtgactgctgcgttgggaatgatgccgctccgaggtgcaactgccccagcagtatcatccgcgagactgcgaattgccgaggagactggcgcaagtgcagtcgcaattgcaaaatctaagagaaagccacaagaaatcttgacaaaggaatcattctggaatgccatcacagtgctccaggctatcgggggttcgaccaatgccgttgttcatctgctcgctattgcaaataggcatccagaactgcagggagtcatcactttggacactgttgaggagattggccgcagaactccgctgttgatcgatctcaagccgagtggagataactatatgaatgatttccacaatgcaggaggcatgatggcgctgttgcaagtgcttcgacccctgctccatttatctgctttgacagttactgggcaaactctgggtgaggtcctcgatgcgtcccaatccaagcgacttgtttttgcacaacagattattcggccaatttcagaccctttgtttcccgcgtcatccttggctgttctgcgtggcaatcttgccccggacggagcggtcctcaaagcctcagcgtcgaagtatcggcacttactcacacacactggaccggctgtagtattcgagaattcggcagaccttgctcaccggatcgatgatccaaaccttcttgtgacgaaggatagtgtactggtcctgaaaaacattggtccggttggcaacccgggtatgccagaggctggccttataccgattccaaagaagctagcagaagaaggagttaaggatatgatacgactttcagatggtagaatgtcaggcaccgcaggcggaaccatcatcctccatatctcgcctgaagctgcactgccagagtcaccatttggtgtggtggagacgggggatttgatcgtttgcgatattgagactaggaagttgcacttggaggttacagaggcagtattgcagactcgaatcgagaaacggcgacagagccttgtagaagagacccgggcaagaaagcagatgagaggctaccgcgggttgtatgagcgatcggtgaatcaagcgcaagagggagcagattttgatttcttgacagctggaggtgccagcacatagaaccaatttcagatacaaattcgatataagactgtatgccctttggtcccatcgaaccttggattgattgtctggaggcccttaccctgagccctgagccctactttcttgcccgatcgggttaaatcaatcaaggcgcgtaacgcggacgcgtctgaccttgtagatccctggccatttgtgatccaccagattaagattgaacgatgctccagactttctaattgcaacctgatcgaattatttgcgtcaggcctcatttgcaatgagtttcgaccctcttcgcccgcgggggcgcccagcccgtaagtcatgctgattacctggggagactacaataattactgacaacgcggctttcacatagacacacccggcacaacgatactgacctacacacctgacggacgatggatcattactggtggctccaattcagcaattcgtatctacacggtcggcgaagatggggagcctaagactatcgacgaaggtgttgacgcgcatttcggcattggtgctacggtatgtcagaaccgaggactcaggattagccgaaggagctgactggattgccagaatcgatctttcatcatgggtgccgaggatgggacagtctggaagtacgacattatgtcgggcaagatgcaaaacttgcttgtacgatgcgctttgccggtcagggacattgcagtgaccagagacggagaatgggtcgcggtagcaagcgagtaagtatcacaagcattgtgttagacagagcattttatgctaactgtggtgggctagtgagctcacagtcaagatcgtgaaagtcgacgacatgacgcaagtcaagtatcttcgggaacagtccaagggaacgaaacatgtcacgttcgatcccagtggccggtatgcgacagtatccggaacagatggaattctctatatatactccatgcacgaagaggagccggagctagtccgcaaactcgatggggtgattagacgattggagccagacgccgaggcgacatcgagagcagtgtggcatcccgacggtactgcatttgcttctgcggaagcgactagggatatttctatctactcaacctcggaatggaagaaggagaaaacatttgctggtggacataccggcgacattacggccttgagctgggccccgaatggatctcttctggcatctgcagcgtcagatggatatattgtgctatgggaagcgaagacgcaaaatatcttgcagcgatacgactttggaaatgtcatgaacctatcctggcaccctaccaagaactccctttcattcacaacctcagacggagagcttttcatctacgataactttgtgccgaaggatcatgagcctcttctgcagaaaccgctgcaggctgctcctatcttgcccgggcctctgggcgagatctccaacaacgttgggcgaaccacactggcggaacggtccaaagaggccatccagcgagcggcgagaagagggactcctgactcgctagatgatatccttggtgaagatgaccagatgatggattttgtcgaggatgatgatggggctggctatgccgatgaagagctaaatctgtatggcaagcggccacacgatggtctcgatgatctcggctatagtaacaagcgcctgcactctggctttgagaagcccaagtcccatccacctctccaacccggtagcaccccttgggctgggagtaggagatatctctgtacgttctcgttccagtttcattgaaatggatttgctaacatggccaggcctgaacttgacgggagctgtctggacggtggaccaggagacgcatcacaccgttactgtggaattttatgaccgggaagctcatcgggacttccacttcactgatccatatatgtatgacaaggcttgtctgagtgagtcttttccgcatttctcgcctttttgtgttggatctttggctgatcacgtatagatgacaacgggacactttttgccaataacccttcggatggtagtccggccactatcttctaccggccacatgagacgtggactgcacgagcagactggcggactgaactgcccgagggagaacaaattcgaggtaagacttcaaaggtatatagtcaacctaatcatcttactgatgctcattatcagctctggcacttagcgattcatacattgtcgctgtgacgtcgaaggactatgttcgagtgtacactctctttggaactcctttcaaggtgtatcgacagaagagccaagccgtaacttgcgcggcgtggcgggactacattatgagtatcggaaacggtcctacagggattgatggccacacgaccttacgatacacggtggagaatgtcaagcgcgacgaaatttgccaaaatgaagacactgtcgcccttccggaaggggcttcgctacagagtgtgttcttctccgataatggggtaagtgacatccacacggaggagttggatatggaattgaccgccttcttaggatccttgtatctatgattcgactggcgtcctactggttctgcaacactggcgcgcacccggccaagcgcgatgggtaccactcctggacacgaagcaactggcacgtctcgcgggaggacggaaagaagaaacatactggccagtggctgtcgcacaagacaagttccactgtatcattctcaagggtggcgacaagaatccttacttcccgcggccgttgctcagtgaattcgacttccagatcccggttgccagcgctcttccgaaggattccagcgaatctgaagacacagcagccgatggtgcccgtttcgaagaatcattcgtacgtggaaatgtacttttgtcgctcttccgcgaccttatctcgtcgaccaatgcaacggcaagccaacgctcagacttggcgcggagggagctcgacttggataagaccttgctgcagatgctggccattgaatgcagagagggcgaggagcgtggtatgaaggcgctggagctggtggccctgatgacggaccgcaacggtaaaatgctcgaggcagccgctaagattgcacagcgttatggacgtggtgttctagaggacaagatccgcgatctggctgaacgacgtgtcatgggaatgggagacgatgatgaactggcttgaggacggggattcttacgaataatactttttcaaattagtcggaatcagagtagatccgtagatttataacattctcatgaattgtatgaattgtactaactatgtagtgaatgtagtgaatgtagtagtggatgtcagtataaaattgtataccagagcatcctgattggctctcgcaacgtcattttccccgactccacgactcccggactccgacttcaaccttcaaattatctacatggcttgataacgatactaagttcagtctgcttttgaaatgcagaatgccgaagctggtttctctgcgaacgtctcttcccaatcagccgaagagttctgtctctggccggctttttgcttcggtttcacgacaacgactggcgcaacttcgtcatggccttctcactgagccctggctacctccagcttcagctacacctctgccaattacatacttctccccggcttgggtacgcagggagcatggggaaggtcctcggagaaccgatcacaaacccccagatgaaaggaccttgaaactcggaaagagtatgtactcactatctcattcatcttaaagaaaaaaggaaaggcagtcgttcaactaactattaactattaaagctttacgaaccctctcccccctcttgccaaccatcttgtacaacaccttacccaccgaaatcctcgctccgagtgtcaaccttcacctattcccatccacacatccacacctccccaccgtcaaaggacgcacactctatcgcgcggcactatggactgtccccgtagcatggagtagcgtaccactggtcggcaacgtgaaattgcaaattctcagcgaaaggatcgtacgcgccgggacgctgctcgaccccacgcatcacggtgcccaccacgactgcggcgatgagcgcctactggtacgatggaaaaccgaaccacgaacagacagccgccccttccacggcccggcctctccgaataccaactctaccaactcgcaaaccgccccatcacaaaatagccatctctcggcttctacaaacggcactaacaaaggcttgagtgtccttctcggtggcgaagagcctattttcaagctgtcaaaggaagagcaattcacgggtatctttatcttctccttcgatgaggagggtcgaatcctgactcataccatcgagcatgccgatgaagcggacggctgggaccggactgctaaattcgtgactctcactgactggctcattggcaaagcgcgtggctcgttggacccagctgccaataccggacttgccatggcgactggtcaaaatcaagggtttgcttctgacggtggccggagaccatgactgcacacgatcatacctcgagcgaatttctcattaaatgaaaaatccccaaggcaatgaaaggacttgcgattaccgctgtgtccgtgtactctctcccaacttcttggtgtattgtggggggtttttttttttttttttacttcgatatctcttctggattcaaggcgcaacgatgtctggtcatgggtattgaatgatggggcgttttggcattgaactcctctctttcacttggccttgtctgctggcatccttgagacatactatcgccactcttctgtgtactataccctattacggactaagaaaagacccaaagcaatggtgaaatcacttgttacatatggagaagactttttctaggaattgtgcctttcaccaggttctacagcctgctagtcgttatcgttcaactatacgagaaaaagaatttccaaactgagtgaagagtagcaagcatgaagacaaggcaacttgagcataataatcattggctttctacgaaagaaaatgagggagatggggaggcgtttcggggctgatactgttctctcagttgatataacaaaaagaatagtgagacgctgggaccatctttactttaagcatgcttggtacaatgtccctctgtgtatctatgtacattactcggtctttttgtgcgcagcaggagccttcaacaagccgaaagccgcaactgtgacgacacacatggcgaacccgccagtagtataagcagcctcacggccagcccaccaaaacagggagcagaacacaatagggccagtcgctctaccagcctgcccccatccccgtaaacgacccataacagcgccgcgatccgcgtcctgcgcctcgaagctgcccaggctgttgagtgaggtgacaaccgtagcggtcgttaccgccaacagagcacccgcagcatagagaccagagggcgaagaaacgtgagccaggcagaagaatgagatagtacaggccacaataccagcacgtagggtgaccagcggtgggagacggcgcaccagcgtaccctggaggagggaggcgatcaagcccattagggacaaaagacgtccgttcaatgcagcagggctagccgtcgcggctgattccccgtatagagtggtagtgaggaaggggagggaaaactccagaccggagaaagggagcaggaagaaaaagtgtagggcattgagaagggccgggctatttgtatggatgcgcttagcggggggacttctcttctcttctgtctttttacttgactcatcattcttctcggtggacgtactctcgccctccatctgaagagtcgtcaagcggggatgcgtctcgggcaagcaggtccaaagatacacagtctccataaagatcagagcaaaagaaacaattgcagcgacaatgtacgggttctcggcaaccatattgacattactgagcgctgcacctagcgccggcccaaaagtgaacgcaacgctgaaacaggccccaattaatgccatagaggagccgcggcgctcctcgtctgtgatatccgccacaatggcattggccatttgcacatttgcttcgctcaagccgccaacgatacgactggcgaggaatgtgcggaaatccgtcgccgatacccacagcgcgacgctcaagaggttgcctagcatggagatgagcagggcgcgacggcggccatgacggtcagataggcggcctatgacgggtgcagcgaaggcttggaggagggagaacaaagagccgagggcaccaccgaggagtacaatgtcatagcgcgagtcaatggggcgcgcgaaggagtttttgtaggcatttaggtagtggaagatgcggttgaggagggaatccggggacggatcttgcatgcgatagaacgatagcagcgaagggaagaggggcagaataaatgtaaatgagatctaaaggcgttgttagttgagtaaatgtgattgttggcttagaggggatttcttggtgttaccaaatctaacaacagtgacagtatcaacaccttcagcacctccttacgttgggcgccagcgacggccatggttgctggcgccgtatatacaatggaggatgtaaggagggagaaaagaagcaaaaatgtgcagaatgacaagatctcgagaagttgacagttgtacaagagtacgaagatcattttaatcagatcgaatacgccagctccactgacatttcctatcgtgggttagcgcctttctctgaaaacgggtatccaaaaatgcgctagtaaaaaccaaatacgctcgaaaggcgtatttggttattttcattagtccatgtataattgcaccgaatttgattcggtctagtgtaatagcattacaattacgctaatgcaatctcggctaggatagtggagaggtggaatcacgtgatacagcagttaacttctaggtagttactacgaccactactactactaatctatatacatacaacagttacgtatgtacataactatcatcagctacatatgtatcgactattgtccaactattcaagcaatagacctagtaaatatgacttcgtccaatgaaagagtcccatattgaaaggcattgttgttatctagagcaaatcctggaaagtaatggtgcactcattatgatcaatttcgatctatgcccagcctaagcctgtccaccggtccattcgcaagcgccaataaaaacaatagccatagaatacatatgtatgtcatgagagaagctctctggggatcgggaatatgcacgctgaaaagaaaattgcaggacatggtcaagaagactttggcaaagccagacgaagagatcaaagcgactctccgtgaagaaaattcgttgcattcgtgagccatcacatcggaccagaaattgtcgaggccagtcccgagaagacagacccagaaatccctcattggaacatcaatttggagacttactccccaaactagcatgttccaactaacaccctaggattgccactcttactcgctggaagcaggagcttccaccgagccagaggcagggccacttgcaccgcctcgaccacgtccgctacgaccgcctcgtcgtcctccacgtccacgaccctcaccggcacgagtctcaccaccacgaccctcagcacctcgaccctcaccactgcgaccctcaccagtacgcttagcgtcattccggcctcggccaccacgctgtccgtgacggcggcgtccaccagacttggcaccgttctcaccctgagtagtaacatcagcgccaacggagccattgttcaaacccgcatcagcgctagccggggtagcctggaggccagtgtctgtctcctcagggttgcgaggaagcttgacccattcactgctctcatcggaagtaggagcccaagtttgttccgcaatagggtttccaccgtcagaaaccagagtctgggtaggaggggccacctgttcagcttgggaagctgcagactcagcctgagtgccgagggaggtatcctggagctccgtcagaccggcattagccatggtgggatcggtcgtagggtcggtggcgtgggttgcgtctggggcaacttcgggagtctcgtcgggcggggcgaacttgtcagatgcttgcttcacatcgccatctaaatagatataatgtcagcgagcacatccaaggatatttgattggggcgggggtggggggaggccttcgttactgacaggtaaaatcaagagtggtgccctcaacagtattgaccttctcatcggcaccctcagcaatcttcagtagcgaattgactgcagattgattgccagcgtacacctcgaacagaacaccctcaaaagcacggctctcagtgctgacggcatcgccgtcgcgtcgaaggatggccgcggcgcacaagaacttagtcacggtatagaactgctggcgcagtgtcttcttggaggcctcagtcgcatcagcaatggcgttattacggacagcttcgagctcctcctcatgcgccttgacaagcgcagccttttgagcagccagacggtcctcgtattgggcagcaaattgcttgtagtggccaatctgctcctcagtctgcgcgacggtggcctgaagggaaggcttcttaaggacctgggccttctggtcgttgttgatcttcttctcttcaatcaggtcatcaagcgacttgtcggggttttcggcgatgatagcatccactttgccgagagagttctagcaaagacgacagcaacgttagaaatgtatcgaaagaaacagattgtaaccaaagagcattcaataatgactcaccaacttcttcatggcattgcgaagtgtcctaaacggggcatacagttagctcacttccacttgcgcattggcaatgaccatgccaccaggttcgttagattttaaacatacttctgcagctccttcaagtaggtattctcctgaacatcacagttaggactctcggggtccttggagacgcttgaagaccgggagcccttctcctcgtccttgagcttctgggtagcggaagcgggaggcatgatgggaatgtaacacagatattaaagtatttctgaaaagcttgtacaggtcttgaagaattaaacgtgataacgttgaagaaaagatgggttgttatgaaggaagaatcaacatgcgggtcggggaaccccttcttggtcggtgtggcccactggcttggggcagactctctctctttctctctatgcgttagcacaaagcaattaagcaatcatagaactggactacgtctataactgcgcaatttaccagttaacagatttgttatttgattttcttccattgtattgctccagggtatcatattcacattcgcccacaacgccataatatcacaaaatgcaggccaaccttagtacagtatctatcccccctcgcctttcatatccatgctaggcaggtcttcgccacaatgacagatcgaggttcatataggttcgtatcatgggcttttctatccctggaacctgcgcagtgttttctaaacccatactttgtcagctgtgtgttctcacgtctcctagaaaaagctcttagatagacctcaaacaacgcacctcggtgactttgcgcacggtattcgctgagatattcttctcgccagacttgcgtgaccgaatcgatgcctcgcgcattaacctacaatgtgtcagccccatcgtcagatcaatcatgtcgagaatgcgaatcggagggttgcgaccggtggaccaagccagaaggatagatgaagacgcactcttgcatgaatagtatgtagtccaagaagatctttaaagatagtattagcaactggataatagagaggcgtcatatagggacgaccgcgtaccaggatgtcggcattcttgctcacgctccgattggagtgggctttgacaattcgcttgactgttcctcgtggataaagtttctgaactgccataacgattagaatagagaagatggtgaaatggaagacgaggtgttcatgttcaatgtttccccccaaagaaggatgtggggagctctcgaatccgaccgaataccgcaatgatctgtttcttatgtaatctggtatttatacctacgtacctacctacctaatgtatatggcaggatgtaagtaaatcttcatttcatattatatacaatcttcattacaactgttatataacgtacacttcaacgcagtcgtcgaagaatgcgccaagctgaaataccagcaattgatccaatgacgacacgccaggccaggaaaacccagattgccatgcgcaagcggtcataatacccgcgaagcatgatcccaacagcataagaagtcccatctcttgcttggtctgtcggtccgtaatatcttcctaccccgaggccaccgatgcccacttcattgtggtcatgttcaacattcgtctcctgtgtgactgagagtgcggccgtttcgctatcagcggccgtgttactaggacgagcacccgaccttacattgagtgcattacgcttccgcagattataagtaacgatgctcacaatcagccgcagatcaggaacggtaaatgttggatatttccacaactgcacagcctgatggggagggagcatatccaagaagtcagccaggatgccgagtgtgagaccccagaggagcagcgggcgggcagtgtcactcgaatccgcttgcccacttaggaaccaccccttgaagcgctccatcagggaaggtttgagtatattctcttcaggaacaaatcctggaattgtagtgcattgatgagtttccgacgggaggagcctcacggccgagaactgcatccagcccatcagagacctgattgcgagacgggtcagaaacccgccttgtcgagcgaagcgctgggacatatccacatattccacagtccgcagcgatggtgataggagagcgcgcaggggaatccaatgtgtcgacgctacttccgtgggctgcaatcgaagggtcggggagtcgctgcgagtcgtgaggaagacgaagggacaaagaaccatcaacctgccattcaagtcagtaacccaattctcagcggcgaaggtgaatgacattcgtacggttcggacccccagctggtagtgaccacccgctcagggagattccccacactaattgtatcttccgttgtcagatctaacccaatttcctctgaagcttccctgatagctgcagccttgtcatctacatcctccggatctcgctttccacctggtagggcaacatggccagtccatcggtcccccacgcgcgaagcacgcttgatgaacagaacctccggttcgccatactggacccagggctgtgcaaagaacccatctaaacgttgttggactgactgcgaagcattgtttgcgaggttcgtgctgggccaatggtcgtaggttggtcgtacccgaataatcaaggcaaccgaggcgcgtttcttgcaggttgggggatttgggacgtaaggataaggttggcgatgtagctcggttaatacgccatgcagatgatgcgacaggcccggagctgcagacttgggctccatcaagttgtatagttggtacggagtactctcggtatgcaatatttagatgtcaaaagggctggattgtggagggtatcggtatcggacaagcccatgtgcacgtgcctccttccggtcctggcgggggcgatatcggtctggcccgtttactccccgtactgtaggtacctaggtgaaatacatccttacataatacgctcggaacatcaattatccagatagctagtcatcccccggtccactgatgggctctgattggcctcatccaacgagcacgtgcgtatatcgctggctacgaatgctctcagtctaaagctgctgcatgtccatcgcttagcttcaagctaataagccaatttttttttggcgtctgcgcatatctttcgatctgcagttgaatatcaactcttactttgcttttcattttctaaagttcgatctcaaatcctctctcatctcttccccccttccaacttcccccccaatcagaggtgcacaccggccagctctgcgtaacacattgacaacctgactggctcaaaatgcggtttggaaaaaccctccgtgctgcggtgtaccctccctggaaagggaagtacattgactacaccaagcttaagaccttgctgagagagaatgatgtcacccggaacggagaagacgccagtgactcggacgacgatcaatggactgagcaagatgaagaagcttttgtgcaggaactgcttaatgtagaactggacaaggtaaattctttccaagcagagacatcgcagcaactccgagaacggacaacagcatgtgaagttaagctacgacccttggcatctaccccggagcaagaaacgccccctctcaatgaacagaagaaaagggccattgcctcagaagttctgcaagaactcgataacatcaccaaggaagtcagtgccttggaaaagtacagccgaatcaatttcactggtttccttaaggctgcgaagaagcatgaccgcaaacgaggagcccggtaccgggtgaaacctttgctccaagtgcgactgtcgcaactgccattcaactcagaagactattcgccgttggtccatcggctctcggtgatgtactcctttgttcgagagacccttagccatgacatcgtgcaaccaagggagacagagcatggatttggccgcgagacctattcgtcttacaaattctgggttcactccgacaacgttttggaggtcaaaactcacattcttcgtcgattgccggttctcatctacaggccgggaacttccaaggacctcgataccatgacagaagaccccaccattacttccctctatttcgattcccctcggtttgatctctacaaccaaaaggtcgcacgagcacccgaagctggatcgttgcgactgcggtggacgggatcactaaaagacaaacctgctatccagttggaaaagaagattgtcaccgacgacgacgaaagtcgacaagtcaaggtacagctcaaagacaaacacattaaggaatttttggacggcgagtatcgctttgataagaagctccaccgcatggaggattcgaacaatggagattcggcggccgccgaagccttgaaaaaggatgtggatgagctgcagtcattcatcaaggacaatgacctgcaacccatgctccgggccaactacacgcgcaccgccttccagattcctggcgatgatcgaattcgtatctccctcgataccaaccttgcactcattcgggaagatgccctcgacagtgaacgtccatgtcgcgatccagctgagtggcaccgtaccgacttggacgatgctgatatgacttatcccttcaacgctgtcaggactggagagatcactcgcttccctcacgctttgctcgagatccagcttcgaggcaaggcccataataccgagtgggtcaaggacctgatggtctcccaccttgtcaaggatgctccccgcttctccaagttcgtccacggtgttgcctccctatttgaagattatgtcaacagcttccccttctggcttggtgagcttgaaagtgatattcgtcgtgatcccgaaactgcattccatgaggaacaagagcgactggctcgacgagcggaggagaacattgctgtgggcagcttcatgggagacgcgcgtagccccagtgttcacccactcgggtcaccttaccgatactctagtgcaggctctccctcggtcatgcggagatcctcagcagtcaccgaacctgcagcgcggcacccacgcccctctgtcgcagagccccagcgccgtgataccgaacccgctcccgaaccagaagagcccgagccgcccactcgcctcgagtccatctttcaatccttgggcctatctcctcagcgttggcttggaacagagtctgtctctctgccgcctggtgttcgacaccccggcgtctggatcaaagattccgggcccgttcgcgtggagagcaaggtttaccttgccaaccagcgaacgtttatcaaatggcttcacatcagtatcctcctgtcgagtttgtcattgggcctgtacaatgctgccggcaagcacaaccaagtagcccaggcactggctgtcgtctacacattctttgccatcttcgccgcggtctggggatggttcatttacgagaaacgggcccgtctcatccgccagcggagtggaaaggatctagacaacatgttcggtcctatcgtagtctgcattggcttggcagttgccttggtcctgaactttgtctttaaggttagattccccagtcgttttgttttaacccggccttctcgctaactcgttcaacagtattcatccgcactaagtcaaggccgcaagcacccacttcctagtgtgtctgttcactctaactcgtcagttgttttcgacagcagctcaggaggttcgtggggcaacctgaaccaggcgcagcaggttctgtaatagtctttccggggctttttttatttggacatgtggccaatgaaccccatggctggcctttgggctatcaggccccaactgtgagcatctgtgctttagcgtagttgttgagcaatagcgtgtacttcaaattaacatctttctggggcacttatggtttatatcaattacttctcttgtccaacatgtattcatgtattcatttatgccaaatacatgagagctcttagaagattggcgatccccaagacatacagaatccaaacgcgggacctcgggagtacggaatagcaacgcttacaaatcgactgtcatccccgacatcccaaggacaaagctccagaagaaaaaaaaaaaaagggttcgagatatcccaaatttaaacacgtctctctctatttcctcggaatcgacatccttgacacaatgacgaacttccaggtccagatcatctcagacaccatctgtcccgtaagtattacaaccatatacggatctacacccattcatccatatcctccaattccatataatccacatactaacaatataaaaaacaagtggtgctatgtcggctaccgccgcctctcgcgagcaataaccaggcaccaagccacgtatccagcagacacattcagcctaacctggaaagcattctacctcaacccggcaggagccgagtatcccggcgtgaacaaagccgagatgtacgcccggaaattcggggctgagcgcatggaggcgatctttgcgcgcctatctgctgtgggcaaggatgaggggatccagtttagtttcggcgggaattctggtctcacgcgggactcgcatcgcttgctttggttcgctgggcagcgggaggctgaagaggctaagaaggagggtgtgaatggcggtgttgttggtgggttgcagacgagggttgcggagcaactgtttcgggcttatttcgaggaagagaagaatattaccgatttgaaggttcttctggaggcgggtgttggggcggggttggatcgagagactgtgaagaagatgttaaatgaggatgttggtgctcaggaggttgatttggaggccaaaacggcggccaggaggttggtttctggggtgccgtacatctcggtgcaagggaaatatcacgttgaaggggctgatgaacccgaggtcttcatggagatctttgagaaggtgaaggccgagcagaaggaataaagaacatcatcaggagcccaatcagaatgttctattgattcctacactggtctcattgctatggtcgtgtgtatagttctatcgacatgccgtagcaagtaaagctactcaagactatcaagcaaaggcgctggttttatctcggtacatttttgtgtcaaagatatctgcacgaaaatggaatgtcgaggtagacacgctctcagtgacctgtcacttccagctcataaagctagggtgagcatcccaagtcatgaaagtacacagattaacgcctgtcatgcaacgaatgtctgggtcatctgtcaaaaaaaaatgaagtaaaaaaaaaaaaaaaaaaacaccccggaaagaacagtggagggggggaaggcatagataatacatattcaagacgcaaataggaaataaaagccaaggatacagcccaggaaaaagcagagaagtgaagaacgtaaaacgaccagagcctaaaaccttggccaagtcattccacaaatgaggtcatgatagatcgtagcaagtcatggaattttgaactccatgttcaaattctaggggcatttagtgggtcgtctgtgctttgacctgatgcagttcataattgggaaggtaatcgaaccagtcggtctcgggattgtagcggtatgccttgaactctacaccatatggcttgggctcaagcatgtacaaaacgcccatcgggacatcgaggtcagcgacctcgtcacgcttcaagccgcggaaataggccaggagcacgcgagcaacggatctatgcccgaccaggagcacatggtctgtagtgcgctctacctcgacaataaccgtacgcgatcgattgatgatgtcgaggtagctttctccacctggtccggggtatcggtagaagagtttatctttcttgcggtgggcgtactcctcggggtactgctcttggatttccttgtatgtcatgccttccatcctgccagaatgaatttcgtccagcatcctcatctgtttgacatcgtactcatcctcgttgaagtattcagctgtttgaacggagcgttgcatcattgaggaccagacacagaagttgcgtggcccttcttgaggaagataagatgggttgggaggtgtgatgtcaccggctcgaggcgggaagtgcttgagaaggtctttctgtcgctgatatgcttcccactgcttccgctggtgatccacgaagcgagccaacgccttggcataccttctgccgttctcgctgagatcagagtcaccgccaatacggcctgcggcatcatccaaactttcgccgtgtcgtgtgatccaaatttggcgtggagagagattgaaattgagcaagtagtagacgacttgagaagcaaggaagccatgggtttggtgagcgacgactttacgaccgacatcgatcatctgaatgaaagccatacgatgcttctcctcgtattcgccgagaggcacgtaggacttttcgtagagagcaacacgcttcttgaaatcttcaagtgcctcggttgggtcctggcctttgtagtcgggaccagaaagtttcagtcgcatgttagcctcaagcaaatcctgatccacgcaactgctctcaaggaacaggatatttagctcgggaccagcgcggttgcgaatatggtcaacaatcgctttgcgacgttccatagtgctgttggtcgcatcgaggataccaatactgccaccttcctccaaaatataatccaacaattcatcaagagtgtccagggcgacctgctctctcatcttgacggcacgctgattctgagggtcaaagaagtcggcggtttgatccataggttcgggggaagcttcattgatagcttcttcattctcacgagattgtgccgggcctgcgtcgatcgagggcacaacagtactttcattttgagaatcttgttcgggctcttctccattcacgagaatcttggttgggaccactggagggggaagcggtgccccgttctctggcggggagacgtctgatgagttcaaagtggtgccaacgctgacactcaaccgacgcactgagtcaacgagatccttgtggaaagcacttggtttccgatcctggccacgatcaatcggggcaggtgagggggacttcccagcggccacacggcgacgctgtccaacattgaagatttcggtgtcatgttggagccagttcaaatagcgggccagcttcttggtaatgtaacttttgcctcgggccgggaggccgaccatgacaatgaccagcttggcgccgacatcccgctgggcaatgcggccatctggagataccttggacttggtcaatccggggatatcgagagtagttgctcgcactcgaccgggagtaccaggaggttgataaaggcccgatctgcaaggaccccattagtcaccgtttgccaagcacatctaagcaagtcccgagacagaaaacgtaaaacaaggggttgaatagtccggggtaaggtagattagctcagaataaggtgcaaagagccccagaactggacacatcccgaagcgagccgatcaaggctcgttctgataggctcagacatagtaaagtggaaaggttctagacgaaaatcaacaagactcacatctgtggagacggtggtgcggtagaaaccggagtgtccgtcaaagccgttccgactccgcccttgggcggcagtgaagatttatgggaatcggaatgcaggtcgttacctagcgctcggttgaccacagttttcgtaggcagaagagctccttcttttcccgatcccgagccattagatgtgccgttgggtttaatattaatcctctggtcccccgtctcaggtgaagtggccgacgtcatggccgaccgggcaatgctagaatgttgcgccatcccactgggggatgttctgtttgtttattaagaagagtatcgtctcgctcttttcagagcttgttcacgagttgtctcaaagttgataaggacttgagtcacacctgggcaactggaccaaaaaaaagttggtgagagaggggaaagaaaagaaagtgtgtccacggaggtttggatgagtcaaccaacgggaccagggaccaccgggtctgatattgaccacctgggatagtcaaggggatttggaatattcaaggggttgaaagaatcaaagaggttggcttttttttggatctggagtttctttttggtgcaaatatatttttttgtatttttttttttttttgttttgtttttttcttcttcttcaacgtgtggggaatacaatatcactctcaaggacagtgccaaggacgtcaaagagacctttaaagaaatactttgaaatgatgaaatcaggatgcaggttagatttagttcatagggtggatcgatggcttaaagatcggccatatatgatgtcaaagtgtatacaagctttgggaagatagcaagatattcaagtctaatacgggattaaacagatcttatatatacatcatagacacaattgggggtctcacaaaaacatgcaagatgtatcggtcctatctgtaatagagaatgcttggctaagagtatacagattcgaagaaaaccatactcaatctgactcctgtgtactttgccctgcaatatcctcataacccaccgaaatgctcatagccgcttgttttcccgtcttggtagagtcttggtagggggtatcagtactccgtacaccttcagttgattccaattatggccggctcaacaaaagcacacataatactccgcatttggaatcgaactcagcctccagtgaatcaaacaacactaaccattgagacaccttgtgtgacctgagtctcaccgctcgggttgatccatactcggcttccttggcgactttcggtcatcaacacagcagattgatctccgaccaactgtaggcgtccgttgctgcacaccgatgtccgctgccgtaagccccgaaaatggtaacccatattccgtggtcaggtgcggaatccttggcgcttggcggtaacgcagggggtatcacagatagcatgcctagaagataggctccagggatattagacatggtggctggatcgcgtgccaccacacagaatgtcccttatcacttgctcaagtccaaggtcaagccaatcaagcatgcgtatgccgcaatactcaatgctgtcaagaccaagaccgcatttccactggtacggaatttgtgccgatggatcccatcctcccctatttcagagaagaactgtctgtttccctgcgagcggcggaaaagtccgatgatgagaacacccgtgccgtatatcgcgaacagagccccaatactgtagaactcggcggtgaagatcttgagtacgacgagggcgaaggagaactgagaaagggcggttcggacataggccccctcaaaggtgcgttgagccgcgcgcatctcaaccatttcatccgaggtcagcacagccgagcgggctcggtgcattcgaaggcgataacgatccgctgcacgacgctgagacggtcaatactacgagttaaggtagagagatgaagaatatggggtagaggagatattacagtaaacacacctcaaacatggttgaatctcttaagatcaaatgaaggttaagagtcaagatattggggaatgatatccggacttgataatttcaaggaagttgggttccgcaggagattgagatagcggacacctcacgtggattggaggtacctaggtacctacatgtatgtataggtgcctataggtatgtaggtacactatatatattacaaaacactatatgctaaataataaaacaataaaacaatctatcctattttctctccttctttacatataatacatcgaatattttccaccaataacgtgataccaattccaattcctcggcaattgaaaattccccaaaggaaaaaggcggccatgttccccacactctccagagtcgatgtatctttctccaatttacttcttttacctttccctcctcttcccatttcctctcgaattactccgtctcaacctctatagaaaccatccactatcacccaattcacccttgcggcgtgattgagaatgacgaaagtattcgatgcagcagaaggtatgagtactccgcaccgctgtgaacccccacgcgggatgtgtcgactgactgaaaatagtcgcaaagcataacacttctgagagttgttgggtggttctgtacggcaaggtctatgatgtacgctttcatgctatacgatcctcgttgcgcattgcacattccccggtcatgtctgattccaatctaggtcaccgatttcttgggcagccaccccggcggtgcaaagatcattttgaaactcgcgggccaggatgccaccgaggagtatgatcctattcacccgccgggtattttggaggaggagcttaagcccgaggcatgcttggggacaatcgatgctagcacattaccaaagcagcagatctctgaacctcaagaagagatcgagggtccaccacctatggagaatcttctcaatttggacgagattgaggaggtggctactaagcaagtgagcaagaaggcctgggcgtactattactccgcgtccgacgaccagatcagcaagcgctttaataatcaggtttatcggtccatcctcttgcgacctagagtctttgtggattgtacaaagtgtgagctggacacgaccgtcctcggccataaactgaaaacgcctatttatgtggctcccgcggcgatggcccgtctaggtcacccgtccggtgaggccggtatcgcagaagcatgccgtagctttggagccatgcaaatcatctccaataatgcttccatgacaccagagcagatcgtcaaagacgctgctccggatcaaatgtttggctggcagctttatgttcagattgaccgcaaaaagagtgagacgatgcttgcccgcattcagaagctcaaggcattcaaattcatcgtccttactctcgacgccccggtgccaggaaaacgcgaggatgatgagcggacggggatgaccggacggaccgctgccgtgcccagtggcgtgaaagccgccgagcgcgcgtcagacgatacccccaatccaaccgaaggatctggaggtgtcggccagcaattgttcgcaggcaccgatccttccttgacatggacggatactttggcctggcttgctactcagacggatctgcctatcgtattgaagggcctgcagactcacgaagatgcataccttgcatccctccacactccccaagttaaaggtatcattctctccaatcacggaggacgcgccatggacactgcccctccggcggttcatactctcttggagattcggaaatactgccccgaggtcttcgacaagatcgaggtgtatgtggatgggggtattcgtcgcggcacagatgccgtcaaggctctctgcctaggcgcgaaggcagttggccttggacgcccggctctatggggcttagcggcgggtggagttgacggcgttcgtcgaacattgcagagtaagttgactgggtattcggtctgcttctatttctaactctgtgatagttctgaacgatgagatcaagacatgtatgcggttgcttggagtcgagcgggttgatcaattagggcttcaacatgtaagtgtcctctcatcacttcgtcttttcttctactaactcttctcttagatcaacacgcgcgttaccgagcagcagatctacgatggtcctactgctctcgaacccttacggcgcgcattccgtgcgagactgtaagaggagcaaccaatgttatatactccaaatgtaaatgtgtttatcttcatataattcgacactttcaatatccaagaatcttttctcttggtttcgccccgttggccgttggcccactatccacgccaccttagcccatctccacccccaaccccttctcaggagagaaggggaaccaaaaaaagagaaaaaaaaatagtttccctgggaatcgaacccagaacctttccggaacacttgcttgaagcaattgttaacggaaaatcataaccgctagaccaggaaactgattgatgtgagacaatgcccattatgcgctgaaaagacttctcgccattttctaaagccattaatatcctcctgggcaatccatggatgatcaaaaacattattcatcaaaatatcttacctaggtataaatcttcagattgtcttcctattataaattaaatatgtatttacctaggtagaattggactgttagtaatgtacatatctacctaggtacttaacattaccaaggtacatcccgagccatctattccccgcatctcactgttccctttctcaatctcacaatggctgcgaacatcctacaatggtttccacgtacaaccgctccgttcattgctaatgcaccaatgtttggatttgccgatgccggcctagcaactgctgtcacaaaagccggaggattcggtataacaaaccggcctggttgcagatatcagactgaccatctatagggtttattggcggaggctttgatttccgatctgagtccacccagctcctaggcctggatactcttttgacgagtgcccgctctgtccttggtttgaccgatggccaaccattgccgcttggtgtcggtttcattaccttccagccagacgggtttattgacaatgccattcccatactccagaggcatcgagtagcggcagtctggctgtccttccctcaggctgacgccgatcatcttcctatgatacaggccattcgaaaggcccgggagagttctgagtgggatatcaaggtttttgtccaggtaggaactgtcaaagctgcagaagaggcacttcggcagggggtggatgttctagtggtccaagggaccgatgcaggggggcatcagtgggcccagggtgctagtttgatatccctcttgcctgaggtgcgagaccttctgtcaaggactcggagtacagacactgctatcctggcagccggtggcattgtggatgcgaggggctgtgttgctgctctcggcctaggttggttgttccgtactttattgtcgtaactagttgacaggaataggtgccgatgggatcgttatgggcacaagggtacgtcttgctttttctcagtcatggggccttgctaatcgggtctagttcgtcgcaacctcggaatgccctgcgccgtctgagattaagcagaccattgtatcggggggtgatggtggagtctcaaccatcaagtccatccgacatgatgtattccagtcaaccgatctctttccgaggcagtacgatggtagggctgtcatcggtgctagttaccaggattctcgggaaggggtcagtgatgaggaaatcatccgacggtacaatgaagctagacaagctggcgggcatcagcggaggacagtatgggcgtgagtatgcttctattagtctcatggggttttcgtgttaatggctttgatagtggtgcgggtattggaggtatcaatgcggtagtctctgttgagcatgtcgtgcagtctactcaacaggaggtgaaggtgatattggagcggttgagggcaagattttagctctatatgcctagtatttatttgtacgtctcctcttgttttagtatgaaagcaagatgtcggtcttatatttgcaatatatacggacctaagtatatatacttgaacatcagaagcagcacaaactacaccatgagaacaaggtcaacccagcaatcaatcaccaacccaaacacaggcaataatatatataccgtcaaaagtagaaattgggtcaggtcgagatcgacaaacgccggacgtaggccggactgactatctcccccctccccttcccccctctttatcctcaatctcaattctcaaatcctcggcatttgaagtgactgtctctacctcttagttttctctcccacaatcacacacccttcgagcaaatcaagattcacggccgtgtttggtcagccttgaagttgggaccttggtgttcccttctgagctgcccgcgatttatccctcgatttattcccgcccgcccagtcacgaatacaacgtcggatcgtggatttttaagtgggatgtgcaagaggatattccctacttctacgaccctcacaatactcgacttgacacccagggacggccaattcgcgatgaataagactacaccctcgccgagcccggtccccaaagcctccccaggctcgaaaccctctccctcgccgaccgcaggcacaaaacgcaagaggaatgctgcggcaaaatactatgccgtcaaggcgggtcacaaaccgggtatctactatggatggaatgactgcctggctcaaataacgggattcaagggagcaatttgtgagtgcgctcttcgcagtggttcttccaataggcgtgcaaattaggccagagactgacacataacctcttcagtccaatctttcccctcacaagaagcagccaacgcgtttttgaatggtacgaagcccccggtcgaatcgcagagctcggagaacacacgattctatggaatccaaaggggccgggttactggggtatacacagactggacaacagcacaggagcagattcgtgggtttccgcgacctcgatatcgcaagttctccacccgcgaagaggcagaggagtttgtacgggaaggacagacgcagccaccagtggggttcggcgtggcaactgggcctcatgggttaacgaccgagaaaccgaaagacgcagaaggggtcgaatttgcgccaggcgaaggcccactgccgaaaggagcagaagatgggtttgacccgaacgtcattttagacccagccactggcaaggtggtgtacaagactgccccccagatggcagcgacaaagacacaatcaacaggtatcccagggatgctccggatatacactgacgggagttcattaaggaatggtactccactagcatcggccggggtaggggtatactttgggcctggcgattcaaggttcgtatatgcccccatatctatattttccaccattccttctaactcccgtcacttatcccagcagaaatgtatcggagccactaaaaggcagtcgtcaaacgaaccagcgtgctgaattgaccgcgatccttcgggcgattgatattgcacctcggcaccgagatgtaaccataatcactgacagtcgatattcgattgactgtgttactgtatggtttatcaactggcgtcgcaacaattggatgacccgggacaagaagccggttgagaacaaggacctggtggaatcgattttggtcaaaatcgaggaacgaaatgaccttaaggtgaagaccttgtttgaatgggttaaaggtcataataaagacccgggcaatgaagaggccgataaattagccgttgatggagcccaaaggggagtatctgctaaggtaggggcactacatgtggcccaagaggtgccggatgaattgtttgatgaagatttttaggcatgtcattgcgaaacaaaagagagagcatcctgcatctgttcgaatagtgatatagcgatgtgtagaataatatacctcgataagtcaattgatatgttattgttcctattgttcctatgtaaacatcgcaagtcagatgccaagacttgggatgttttcccacaacgccagagttctctcctttttctcctcttctcttctcttctcgtcttcaccttcatagcaatacggatgctaacatttgctctgaaccccatttcagtacatccagatatccagatgaacttgtctacaatcaaacaggaaattcaaactatgattcaataacatttgcttgtactctcgttcagccttgacatacagacacttgtctaagactctaggtcccaactgatctgactctgttgaatccgacatattcatcttagttaacacacttgggctctcatcgccctcaaatacaactcagaacattttcaagcgggatatagtgcagaccaaaatgccgacactcgctttgatcgacttcaacattgtctgcgcgacgctcgggggctttatttccctcttcgggctagtctcgtacctttgcaaggagcagttctacctatccgaagcatgtaagcgttaagttatccgagtggtatcaccacatttgctaacaggaaatagtaatctccctgctagccggagtattattctctcctcatgcagccaatttcatcagaccagatgactatgcactccattcagaagaaaacctggaggcaatcactttgcattttacccgcctagtgctaggtgtgcagctagtcctagccggagtccagctcccaaagcgatatctgcagatcgaatggcggagcctagggctactccttgggccaggcatggctgctatgtggatgtgcagtagcctagtaatctgggctatggttccgaatttcaagttcctccatgccctgattatcggcgcatgcgtgaccccaaccgatcccgttttgtccaactccattgtcaagggaaagtttgctgataaacatgttccccgtgagttgcagagaattattatcgctgaatctggcgctaatgatggccttggctatccattccttttctttgggatctatctcctccagtacacggggatggcaagccagagctatagcggtggcgctgggaaggcgatggcattgtgggtctacgagacctgggtatacacgattctgttaagtatgatctacggagctctggttggttggattgcgaggaagttgttgcactgggcagaggagaagcgctatgttgaccgggagagctttttggtgtttgccattgctcttgcagtgagtttacctcaacccccacccccccaaaacaaaaaaagtgatttgctgatctcccaaatagctgttcattgtgggaacctgtggcttggttgggacagatgatcttcttgcctgtttcattgctggaaacgtattcacgcaagagtaggtcacctcgacatgggttataatatctcgaatgctaacagagacagtgactggttccgccttgaaaccatggacgattccctccaaccgacaatcgatatgcttcttaacctgtccgttttcatgtggtttggagcggtctgtccctggtcatccttcctgaacaacagcgtgattccaatctatcggctcatcttcctgggagtattgatcctcctagtccgccgcctcccgatcgtcttcgccatgcacaagtggatcccgcaaatcgatcacgtcgctcaggctgcattcgtcggcttctttggtcccatcggggtgggcgctatcttctacctgtcagtcagccttgaattcctgcgcaagatccaagtcgagggcgaagtcccagaggatgtaaagcaagtcatggagaccattcaggttgtggtctggttcctagtaatctgcagtattgtgagttctccccgatcaaatcccacatcctcctactttactcatcttctaaccaaatccaggttgtgcatggcctctcagtccccgttgggaaagccggctataacctcccagcaaccatctccaacgtcatcagcatcagcaccagcacatacgaggaacgcgaaccggtccccatctcaaacaccagtcacacacacagcacggcaacacctcccacaacggcacctctcacaacgggggaggatgcgagttaccgcagccgcaagcgtggtttccggagcgcaatcccgcgcccgcccttctttggcattggtggctcggtgatccctcctcgttcgccgtcccaccagcccggcgtgggtcagcccgatgagccggagagacatgttcagctggttattcatcagactacgagcggggatagcaagcctcagccctagttttgcatctggaaattcgactgatccaggcggctatacttttactttgattggatatatatccaattgcttgatcatccggtaggggaagcgaagtgttgcgtatcattatacctcctgcttttgcccagaattttagacagcatgcataagcatattgttttccgtggtccatttcaacagcattatcgggggttttcctgtggggttgcatatttaaccgtctcaatatgtacagctttgtgtatatgatgatttatccaaatgtgtacatagtcaatacataatcccattggtagaacgtcatcaaattcatagtgtataagtagtacataagtggtttcatcaagtttggtaaggcctaataccaagtgatatcgtcacaagaactcagattggacagtatgaataaagtaactgcacttgaagtgataataacgccatgccataaatatggaaactcgagagtgcaggaactagatagatacaagggagacgcaacgaagctttacacaggccttagatcacccacagcgccatgcatggaatgcccataccctcatagaagatctcagaagagtagcaaatacaagtggtgtgcattggtatcaaatgtgcccaggacatcccgtttcccatgccctaactaaaggaaacttcataacctcgtcaaggtgtttgacctgatagccaaagataaccattccacccatcccgaagggtaccagatcatgttctctgatcgaattcatgtgttctttttttggatttgttactttccttgtcattccttcgatatcattacacgtcataccgaaaagcaaaatgataacgccgttgatgggtctgagagatcgtgaactcatcttgattctgaattcatgattgcaaaaggcgagagataaaacgcgatttaagacaggctggtgtgcagatcgcgggcacggcgagcgaggggtgaaataagtcgcaggattgggtcgtgcgggttgcgctcaacgactgacatatacagggtattgaggcgctggctcatgatgtccagaatgcgaggtgcgacttcatggagatcggtgtcctaaaaagccagagttagtcaagatgatacgaatatttgagatagaataatgacataccctggcgttcacgttttgaagaaccacctcgagccagtggaggcgctggccaatgttggtctgcatggtagtggtgacagcaacggccacggagagcatgacgatcgcagaaagtcgggacaagtaggccggagaaatgtggacaaagaagttgtcgaacaggtcagcttgctggttcgattggagccactaggaaatataaagttaataggaacattcgaatatatgggagtgattttagacaaaccttgatagtgccctgctcgtagtgaccagtattgataagctggacgatatcccccatttcgatttcctcaggggatcgcgcgataggggaagcgacaggaaccggggccggggcctgaaccgggatagcctgaggctgaagccgaggctgagataacggctgcgacatgcgcacctgattctcacttggctgtctagtcgaagagcgcttgttgacgttcaagatctcacggtgggggatctcgtgctgcgggctttggctctgctgaatttggtggccctggttcgcggccaacaaagaaacggttttggacaagccacgcagggcggccgacatctcctcgatctttgcggtatcactctggcgctgggtttcgtagtggttgatctgggccttgaaatggcgttccatatccgactccaccttctttgtggtacgtgccaagctctcaagcatgggggcaatcgaagactgcatgacccgggtaacttctgtctcgatgcgaggtgcaagcttctgtgcaaccgaatcggagacagccttcaccacagggggctgctgcatagcattgatgacagccttgggaagaacctgccgcaactcctcattgaacgcgcctccaagctgttgagagacggcgccattaagctgcttgttgactgctgcagaggtggcatcggcgatgacaggaataacatcggcctggatactggcagaaacaatacgcgctaagttcttctcgacgttgtcggagagcgtgctagagacaaggcgcaacacttggtcttgcttggctgacgaggcagcatcccagctgcgacgttcatcgtcgaagcgacgatggaggttctcgaactcatggccaagactcttgttgaattcgcttgaaacactaccctgcagggtctgaatgtgtttgctgaaagcttcgttcgagaaaccgaaaccaggcacggcttgttcggcggcctgagtcgcacccatcgccgtagtagaagaggcaagagtctcgaactctttggcaggggcggaggggaccggcagagattcgacaccggtagtaacggatggctcctttgtcttggcagcttcggcggcagcggcagccttcttcttcttcttcttttcagacttctcaaccacgacaggtgccgctgctggttcagtgggctcttccttcttcttggccaacttggtaggcgaagcgttacgcgaaggagcaacgccagaagccaattctccaatctctggctttttcaccgattccttgggaccaacgcgagactggatagaggcggtgtcaccgttcacagacggatcgtcggtggcgtatgtggggaaagtttggagatcgctgatttcaatcaagccgtgctccaatgcatcgatagggcgaataaccttgttatccgcagtccagcccaaatcctccttcttgatgttcaagcaggtcacaccgcgcgagtgcataacgtagagctcaaacaggggactttcctcagtgccgcgcttgtcagtagcggacttggtgatagggagaagctccaagcttctcaactgacccttggaaccgagagagatctcccgaattccactcaagcaagcagtagactcgggcttgggtagggtgttgtccttatcgttgaggtctcggatgtaggctgcctgtgacatctgaggcagattgtaccgaggagccgagaggtgagcaaagtagatagagttacgtgtgggatgtccaacgacaatgacccctgatgatgggtgataagccacgctgcagatggcatcggactcgttctcgtgcgggaacttcaactcctgcacggccttgcccagcccaatatcccagagctgcaaggtgtggttttgcttgagaccaaccaaaacataacggagcgccatagatcgcgaataagcgcgaagcttatcgaggaacagcaccgaagtgggccaagacttttcggtgggggagcccgtgacaaatgtagtcaagggcacccggatctccgcaggagcagggccttccacaaagctcgcgtcgttaagcatatcatgtatatcccagaagcgcagtcggccagtcttgtccaaagaggcgatgacagagtcatcatcactgaaagcgaagtctttgccggctttaccagtggagatcttcaacgcacgctccttgaagaatttctcagtgttaactgtacgctgagcaccagaaacgccgtaggtagggctcattgctgccttcggcgaaacaacgtagatgttcttgccccgaccaatggcaaacaagttggtgtgacgagtgctccgcttggcccgcgttttcagctggccaccagaggtgttctcgtctgaggccgggaaaggtgggaagatcaagctttcactttccaaggcatccatatcaaagaaatcctttccagaacgcgagatcaaggcccagtatacagagccgctgactccaatgccgaggatggcctggacctctgagtcaccagccgcagtaggagctgtgcacaaggcaacgttgaacactcgatcacgggtggaacggaacacctgtcggtcactaccgtcatcctgtcgaataattctgatgccaccagttttggcgagcgcgtacacaatgtattcggatgtagccgcagtcaacgagcggtcaagctgatcgaactccttcttcagacgagcaatatccatgacatcgtcatcccggaaggtcgtgagttttccagacgtagctttaacagcaatggagataaagggtctcattgggaagttgtgaacagagacaactcgttcttcttccttttcagcactgtcttccgcactctcccagctgtcagctagagcctcggtgttctcagtcgccttgggggcaaccggaaccgcggcaggttctgtctttgcgagctcgtcaacctgggtcaagcctgccgcttctttagattcagcagcagtctcgcgcatatgactagcggtcgatgaaatgactgcttcagagggttcctcctgggcagtagaaacagcagccttggcttctgttgcagcttcagcttgaggctcatcgccactgagagagcggccaatctcatctacgagacgaccaacgacctcatgcacagcttctctctgaccttcactcaaaattggcgactgggttctctccttgggggccgcaagttcaggtgtctgggaaggctccagcttagcagaaacattgattttttgcttctgcatgacttcaacagctggactctggatgccagaggtagactggggagacttgttaacaggagaaatagcggccaattggtcaaacggattgacataggtgaacattgagtccttcgagttgggcgatacgaccgtttccgggttcgcaggcgccttgggattctcatccacaacttccataaagacattcttggctgcctggttctgatgttcatcaatggcagcctgcatatatggtgcctgctgggttgaagtcagcgccggtgattcggcgacagcaggttctggctgagaacggttgagcaggcgaagtaacatatcctgtgtgttctcattagggccctcaggctgaccagactggaatgccgggggaggggcagcgggcgcagccgtaggggcctgctgaccgaacaaagtagcaactaggtcagacgcggaaatatttcgtccgtgtgacgcaggagctccctgaaccggcggggactgcaggtgctcggaaggtgcagctggggcctgcggctggggggaagcaccaggacgctggctgaatctgagaagattcaaaaggtccacagagcctgggttggcgtgctgtggttgcggctgctggggccattcgccccgaggagacggcacgttaggactcaagacatcagagccctgatgagggggaacatccactggggcaggactttgggtggtcgaggtcaccgatggatgttggtagccatgcgactgggggtgggggtagctctggccatcgtaaggttgctgctgagggtgcggcgggaacagaccgggctggtagtacgattggcgctgggcctgaggattatcctggccaggagtgtttgaaggagaagggcggggccggatactggctaagagagcctggagatcggtgggggtggacatttctgccgttacgccgtggttacaggcgacctccgccgataggatccaagctttgcagagctctcagaagctctctttcgagagggccagagtatgaaactgggaatcagaaaggctagaaaggcaacaaaagaataaatgaaaggtaagtacgagaaaagagagatgaaattgaagaacgtggtgaagtagagaggaagggtgaaggagagaagaactctctgttcaagccgtgggtgtggctgagcctgccgagttgtggcggactgtggctagtgttatttcttgcccgattcgcgtcattaatgtatcggattactttacttcttctagcccactttcactttactgagttcgaaggtggtgagctcactgggatagttcatcaggaaattccaatatatcaattacgtcaaacgacgcttttgtccacctatctgcacctttccgccatcaggccagcgcccgcaaaacctcatcatgttctgtctacgaaggtaagagaagcaaccaacagcaacaagcagcaaagcagatgattagactaacccaaataaactatactgcagctggctacctctccttttcattccgaccaacgcctccccgctcttcatcatttcgtttgttgccttgacatacatcatccaccggccatgtatttactgctccgcattgctcctgattctcttcgtctcgtcatgtcattggtcagaccgatgcatcttcgacctacggagtaattggtttgcaccacgctatacctcagaacctggcgattatgctctctcgggcaacgcaacatccgaagcgacagtgcctggcgatggcctgacgggatttgttttcgatgctatgaactccaccgccaaagccttggctggtgctgcgttggagggcgtccagcaacgactttctcccagtggaatggagtcaaggcccaacgagtggacaggagttgggttggagtggatgcgcagcctcttggggagacgggagtggactcttccatgtgtcgatgtcaaagttcgactatgaagttgcaaaaaagttttgattgaacatggttttcttgttgatatattcaaacgaacctttgatttcacatactttatttacgatccttgtgttttcagttcatgtgcaggtctcgataccctcccttgaaagctcatgaataaccattgtacataacccattctatactaatttatcgatcattgaatgacctagcgttaaagatatagattcttctgctgttgtaactcaaccattgtgatgactacatacgacatcatgcgagggaagacgttgtctagccttggtctagccctcacctatacgtccctcatactaatataagtattgccgccgacaaagacgaaaagagcagaaatacagctagaattcctacgggaacgggactgactgctatgtatgcactaactatgacatgcaatgacaagatccccaactagcaagcagctgggggccacatggcgttcaccaagaaggaggcttatcgtcgccatcatttgaacccggacagaaaccgagttcaaccagcatatcttcaattgctggaacacaagcaacacatgagcagatctagactcgggtcttagtttctgtccccaaagcaaactcgacgaaggcagaaggatatacctgggtcacggaagtcgtcaaacatttctgcagagcagcgggatcgccattgtttatagcattagcaatgcacctaagttcggccgacaagttgagacaagcagcgagactacacgcctctgggaggtgccgaacgatatctagattatgttgccgcactgtacgtatactttgtattagcatgctagcttgccccaattacatgcgaggagttgagcttatggaaagaggtctgtacaggtggtctggacatgggtattattagccaccgcagctgtgcctgcagctgaggccaaccccgaggcgaggacaagagtggtcatattgaaacgcatattcaagaacctttgcagaggattggaaacaagtaaccaagagggataagtttgaatttggtacctattgtgttataaatggacgagcttacgctgttgaattaaatagctgcttataatattatatacaccgaagtttaggagtcattcgcagcaaaagacaacgacagtcatctctcggcttgaatgtcacattggtggccaagtgatagatgggcatatagagcgatgtgtaaaccagaatgcccaggggtcacactgagtcgcattagaaggcttgtctttccccaatgtccgtgtcggggtagataggtagcatcagagactgcctaccctaagagactagaggtgtgtttccacaaaagccttcccatgaatgatttggtctcgtgattgggaatcggcagttttagtcatggttaatgaaatcgggaaagggcgaggtagctaaagtcgattatttgacatggttacaactaagtacatggtgagaggcatctgtcattaaataaaataacggataaaggccgacgagaaggtggtcgaccggaggactgggagctggaaaactctaagaaattcataaaacgtagatgggctggaacgattcacaaagcaaggcatgataaccaccgtaaaggtaagagatggcagatgaatcgtgaaacatgacttaaggaaatggggtatcacaatgtcgacaatcccagttcaagatcaagattcgtaaacaagcgtgaagaaagttatgtatcgccggagaataattagagacgttgaaattcgcacgcaagaaaccgacgaagcaaagtcatagatgttgcaaatggcatgattatcaaatcagttgtagccaccaccacccacgggcagaggccagtcgtcttcagtgatactactccagaaggcccagaccccggagacagaaaggagggtgaagagggtttcgaataaagctccattgatcttgccgtccgaggcctggcacaagtgggtgctgatcacatagttgaagacctggccaattgcgaacaacaagccagcaccggtgagatacactgttgcaccgttagcacatgtctgttttgagcccagtgtgatgtacttacgcattggccggaactcgcctaggacccggagcactagtacggcttccaggaggtagaacaagacaacgcagatgagtgggaagagttggtacagaacatagagggcgatgttgcgatttggtgcgtcatagcttgactggaagcggccagtccaatcgaatccagtgtccaatgcaatatagcctgtcccgatgaagagggccacagcagatgcgctgatgagaccgatggaagctgcagtgccgtcatcaagcaactggaagccgacgagtgcgttcatgaggaggacccagcaagtagccgtgatcgcggcaatgtgtactgcagaaaacccctagatggttttgtcagccgaggccttgagtctatctatcctgtagaaatcctacctttcggactgcgtcgctgagcgggaagccgcctactgtgaagatctcgcagacctcaacaatgatgaaaccgagcaaaaacaattgcatttccctgcgcacaccgccatgtcagctgatattcctatagagaacaatatatcccatacctccggccgaccgcagcgtgtttcttatccgatctccatatcatacccacggtcaagataatggcgatgaaggccagtagaatcgagcctatcagaaattagcaacgatcctcgcattatttggtcccaatggcatcagcctcgtgcctcatatatcgtacctaagttccgaaggtgcctatccccactgagaggaatgccggtcagatcgcacgcgccgaaggcatcagtcgcggtttgattggtgaaaagctgtaacccacaaatgatacagtcagttaagaattccaagccattataagggggtttcaagaagatctcactcacattgcagactggtagggttgagtcgcgacagaagtcctgtggtacccatacgggtttgcggtcagtatctgcttggaggttcagtctccaggtacgatctgcacttacgtgaaagttcccgaattgagtggaccccattgcgaattggaatcttcaaacgagagatggataagtatgtgaggcaatgttgagaagagactgttgagacttgagagttcaagatggggggcgtcttgacccgcgcgcaggatcgatccagatcggtggatctctagtgaaaccaggttcaggttgaagttgaagcagaagcagaagtagaggtagaagtagtagagtgaaactatgtaactgtgtagctgtgtagctgtgcagtgtagagcgtactgcgaggggaaataagaaagctgattcccacgggttactcgggggactcacagggctggcgctagtgtggcttagaaaacaaaaagacctgaacttccaagttttcaggtcgaacttcgatccaaatcaattcaaatcgattcaaatcgacttaaatcgaccaaaatctgaaatccgatcaaaacagattgaaaagagtggcaatggtggttccttgggtccagtcactaataatagtactctcttccgattaggtatcaagtataaaattgctgtgtgtagagaacgcaggctcttgtgatattatagacacttgcaggtctccctagatctgggatatttgttatatttgttatatttgttattcttttcctttttcttctttttgataaagtggtttacctcaacccttgccgaagaacatatggtcgccaggtcgaccagatggactcaggccacaattagcaaacacatacaattttctgaattttgctttgatagagtactgggccattgggatatatttatacgatcatgttatgtgcctgcgttgtaccgttactctgtacctctacggagtatttcgcatggtacttacatatgtatatgtagaagtataccccttaagaactcgatttagtcccattggaaattgattgatccacgtccaattttaacgaatcaggcccttcttctgtaggggacctcatgtagtctcacaagtattcaaacgctcctcttagcacacatcttcgatcaccaatttttgcccatcataatcgcccagatccagcttcaaggtgcgcccaaacagctcaagcagcatctcaaagcagaccttgctaatagccggatcataccgacccttgctgagctcatcacggataaaggcatctgaatacgtatttctgtcagcacacttgtgtttaacagtgttgagagtggtgttcaactcacgttgtgcccaagcgacttcatagaaaccaaataaaacgcccttatcatgcaaggtcttgcggatgagatcgcgtccctcgggcgggacgtggttatcgtttttgccgaagatctagagattgtatttagcaattaaacccaaacgaaaaacaacagaaaagaaagatcttaacataccattagcatctcacccttgatatccccagctctctccaaactatcatcgttctttcccagggcaagggtcttgctgtggatatccgtggcaaagtaacacacgctcgccttgacccggctatccagcgcgcaacgataggctaagtggccaccaagacacatgcccgtggcaccgacttggccattgcaagtaggcagtgagagcagataatccacactgagactagcgtcttcatcataagcggcaagtttctgatatacagtcagcactaaaattcaagcccaaaaataaataaaaataaaaataaaaagatccctaataaagaacaagaatggaaaacgcaagtaaagcatgttactcatggaagctgtgttattttgcttaccttaccaatcttccacgcgttccccttgtccgtgtcctcggcgtcatacttcagaggttccgggccagtgaattcatgatagctcgaaggagcagcacagatgtagccctggcctgcgatctggcgtgcaaagcgtgccacgggtcccgttactgcgggtctttagtggaggtgttcgggcatgatcgcaatggggggacacgaaccttgatagatctcgctgaaaactacgactccggggaagcgggctttggggtagcccgggattgtcgggtggaagacatagatgcctggtaaattgtcaggattgacactatgaaggagcaatggctctatagaggagagaaatgtgctgtagagggaccgtagtgtacatacgcatcgttccctgtccatccgctttggtggagacatcatgataggattcttggatcagcatggtgtctttattttcttttcaaagatagtaatatactggaaataagatcgaggaacggattggaatgatcttaaagaatacagatgattgaggcacgaaagcattatcgataacacacacgcggggcagtcatgtgctgatactggccaacatttcaactacttagatccatctaccttcgatacattgtaggttaaaactgaatagaaaataatgtctcaaatatagatgaacttcagaatctaggtgactcggcgcaaccgtacaaaagtcataaaaagtcataaagtggtttccaaataagtcagaggccacaccagagggtgagatcttgcttcatgatcggtgcaggtattaataacattccaattcgacgttataagggtttgtttttatacatatgttacatcaaggttgtttggcagaatgatggtcgagttagacctaaagaagaaagatcccctgggctcccacctaccgagcccccaatgagtccaagggaaagcagcaggctgcgattagaagacatactatgatttacgaggtcagccacaggcgctgggaaagtctttaataaggtcaagttactcacaggaatgaacaggtaaggcacctggcgttcgtactcgagccaggtctcgccgtacttagtgcgacaccgctgaatatcacgaagagcacggtggctgatcatgcaagcgaagaaaacgggatagaaccaagggaacgggcttgagaagccggtaatcaaaccccaattcagagcgaagtaaagatcgcacgtgtagtggattttgcgggccttgccgtctatgaggtcgttagtattggaatttgtagattttgatatttggcatagacttacaccacccatctacaagaatctttgaaccatcagccgcagtaagggtcttagggttctccaatgtctgccagggaagttgggggaaggtgttgcgggacaccatggtaccacgctcctgctggcggaaacggtttttctggctgttggtggtatcccaaacccagtagacgaacaggtaggcggcaaagaggaaggcaaggaagtagcggttccagcgatattcagcagggtcgtggttggcgaggtaaatggtgcagtggcagtagctcagaggcacaccggccaagttccagaagatcagcatgaagccccacttctcatagtacatatccctgcaaaacgttaggaaataatcttgattctggagcaggaaacacccttaccaggtagacacaatgcactcctcacccttggagcaggcattggcataaaggtaatgagccatgacaaggaacataacctcgccagacacgtaaccatacaactcccattggcgggcagcggcgcccatagacaggccgagcagaatgtaccagggcaggcggacctcgaagaacatcttgaagtcgaggatcttgaacatgcgggggttaagctcggcacccatgaagaagtcatagatcgggtagccagtcatacggtgctctgcgccacgcgccaaagccgagaagtaggcaatgaaagagacgatatatccagaaaggatggcaacgctgagcaaggggccaaactcatcaatgatggtgtacagcttgaagaccccagtgacatgcgcaatgagtgccaatgcaatgctggtatagaaagaccacacaccagagcagtaatatggcagctgcttaccacccatgtgtggcagggggcgacccgaaacgctcacaccgggaagaagcacgtaacatgcaccctcgaagacgaagaaaacccagtagatagtccatgccttaactgacgggaaagcaccggtgtagaccagatcgaccaagtgtgcgaaaaagtcgccgtaactctcgttctccgcggggcgagggaacttgccatcgtagtaggtggcaccaatccacatgtagtacatgagcatggggaatccgatcatcatggatagcacacccaaggagccaccgaattcaaagtgtccgctatagtccaccttgggatcgaggccttcctcccaaccgtccaccacgcgcgatgcggacttgggcttgggggtggtagtattgccattggtcgtgaccttcgcaggtgtatcatcctcttcaatcttgactttggctgaagtacgacgacgggaggcggactttgatctctctagggagggggagttggagacctcactctcgctaccctcgaagacagaattgttgcgagtggcacgacggccgccgggagtctcaatgaagcccgggcgatccatttttctggaggaagaaaggtttccaaattagcttgacaaaaaaaaaaaaaaaagcctagtatatgcaagccaaaagttccgggtattggcaagatataaccctggaggattcagggtgtggatacgtcgcaactaagatccggtgggaactactcacttaggggtcttccccgtttgagaacgggttaaagtcatggtcgctcaatcggaagaccaaggttccgactgcaattgagggtaaggagaggagtgactgagggtaaaaaggagcgagggtggaaaaaaacaggaatgccctgaatgtttactttgtccgccggccccgtactaatggattacataataaacaattttaaaatcagcctataaccttaaagacttccaagtcaggcaaaataactaactatcggttatgctgaagttcataatgggggtatttatgtatttatgtcgtttgatagttagtactagagtagtaaaaggcattggtaggtacatagtatattcaaaactagaagaacattgaaattgaggtatatagatttccctccattcgacactaaaagggggtaaatctttctttctttttttttttttctttttcactataacatagttacatagcaccccgtggactagcagataggactgtaatattttaccccccactattccgtacaactgttgtagttaaaggcaatttaccatttagggagaattagtggttgagagtgtcattgtggggggctcgctgtcaactgcctattttgactatttggttcttcaagccctagatctatgcaattaccccttattgtatgccaatgtactccgtagagggtatactgtatgtctggactggttttatttcttctaattcttctcccttttgactccttactcttaactaccattgagggagaacctttttaacagccttttccccccctatactccgtagaagacattgtaaaagaatcttaaatataacgttccatatatcatcttgagtcaaatgcatctgaattgtaaatgtaaatgtaaatgtttatttgttttatttaaatatttcacaaaatccaacagtaccggtaggatagcacacgggcacagccgagaaccacaaataataagacaacagcccgaagaatcagggaaatggtttcatatatgacaatgcagtgcggttcaacataaaattgagagaagtgaaacaaaggcttcgtcaatacctatgcccctctctgactgctagtggccatcaaggtgatcttagttttattcttcttctttttcttacctgcactggaagatggtccaggatttgcattttggtctccagatgccgtctgagcaagtagatcagattcctgctgggcgaagagctcatcttcccagccctgccgccacccgtcactgtgtatagctccttgagcctcaaggcttggtgacagtgaacccactgccgctgtgccccaaacagtgcggctacccgggggactggtggaaggagaagccaacgctccaaatccagccgatgagcgtggaggagaggccgaggaggcggtggcgtcgtataatgtgggatccgcgttgtgaggcagtggttggaagtcatgagcagagaatggagcttcactgacgctggcacttccgatgcttggccgcttgcgccgagcagcagcccaccgtttgtcgtcctcctccttctccgcgcgaatgcgatctttttcttcccgggcttctttttcccggttacgctttcggcgtctatcagtctctgcgcggaaacgcgctagaacttcggggacaaccacgtctctccaatcgcactccaggaagctaacctcacacccctgcggaagatgcccgaggtacttcactcgcttgcgaagttcatcatccacaatgtggcctgttgatatatgctccactcgcggtaggatggttgcagggaacagagaatactctccaaacgcagccttgaggatgcgaatgtccaaggaagagaggtagaattgaggcaacgcctgatagaaatggtatggttgatctggcccggaagacactggcgtttgcttgctgcggcctttctctttagctttgacactggatccaggttcaaggtggactccgtctagggagttagagagatgatccgcttcatctgatgtagccggcgtcacggtagtgtgctcagaagagctactggatggcgtaggagctatagtgcgttccttaactggccgtacctcaggtggattgccaatgcctttcagcttctctttggcatccatgatagaaccaattgcttttcgggtccacgtattctcatcgccaaagagaagctcgtcttcaacttcctgtttgcggaggtcttcaatctcggcatcatgctgagcggtcatatattcttcgccacctttcatgatacgtgcatagtcggcaacttccgccacatcataccacggaacatcctcgtctggaccaagtgtctcagatccatcacgaggcagagcaagggtgctgcccggctctcgctttacgagtctcaatacaacatcaccgccttcgacgggaagatcgccttcttggccgcggaaccatctgacaggtcgagtctcggagatatacacagaatcccagcagataggacatttcttccagcggtgccgtttttcagggaccgtgttatcgtcgtcggatgagtgcatgtatcggataagacatgggagacaaaatatgtgaccacaccgagccattcgcggtgctaccggagtagaaagacaaatgggacaactggcagcctgcgtttgagcagataccagcacttgaaggaccgaggcccaatccagatgaacatcggcattggctgcctgagcatggaaactctgattaggcatcacaataaaccggtaattcgcatgaacataacgtgatttgtcgactgcacccgctccccaggatgtataccgtcgaatgctgcggggaggtggatggtattgtgggcgaggtggaagtgaaaagttcattaagtgagtgatggacgtctgccctttccggctggtagtggatttcatggcagcctagataacggctctagggtcagcaggcagctcttcaggaagatagacccgtgaacccaccgattcgttatactcgtcatcatccaataaccgaggttttctttgacggttatgttgactcttccgagcttgattattccttggggtggccgaagttttcgatgacaccactggccggaagcttgcagagcctcctgcgcgcctttgagagctgttttctgctggagctgctgagtggaatggagtagacgaggctgtattcggaatgtttaccgctttagaagggggcgggttctgtcctgcattggatgacatctccctgcggtatttgcctgcgaccgcgagaccccaataaaccaaacaagaataaaccaaacaaggcagagagacagaacaagccagttggctgaaaggaggaggaggggttctatgagggactggataaaaccactaactgataagatgtcaatcagctagcgggcagtagatcgagtgatccaccaggtgcctcggcttggaccagaagaggtgaagaagaatgaacgacccttaaggccatgtaagaatagtaacgaggatcgagggacggccctcagggtaccagttgatgtcgtgaagatgcaatttcgcccctctccggttacaaatcgtaaagtcacgtgaaccaacaagtcccgacacccaattcggtctcggtccccttcagcttcatttcgttcgacggtgaatcgaggcctcctaaccctcgtctcatattcttttttttttccgtttctttcattctgctcactcgctttatccccgaacttgtcaactctctccgcctagggagttacttgtacagcgatttacttctttctcttgtttcctcactccgatctggtttgccagtctccttcaaccaatcccagcagccaaccccaacagctctttcgacccagttcatcctccactcccactctccaacacatccagcacctcttgcccgaggccacgatggctgcctaaatgcgccagcagctccagatttttccttcctcttgactgctatcacgcatggcactcatttgaggcaacgcgtgaccgaacgtcaagacaacttctttctctaactagctcaagatgaaccaccatcttcctgccatgccccatgggcagctgcccatgcctcctacaaggcgccagcaggacttctcttacaacgccgcgcctccccacatgcgatcacctcagtacatgggttaccctcacatgaatggccacatgcctcatcaacaatactcatcgcagcaatacccttactggtatcccccatatggacatgtccaaggccctccacgtccctaccaggcgccctacggaccgatgattgtatcctcttaccctcactcgcagcctatcatggcgcccacgcatattcctcattcgatgcccatgcatcaaagaactccgactccactgcaacccataatgtctccatctgtcctgcatccatcgattcaacccattcagcccgaaatccaggaataccctgctgttctaccgcactcagcccagggatatcccagcgcttcaccgccaccgcgatggggaccacagtcaaacttgccgccgaagcccacttttgccccaccagtaagtgtttactctcaatatcaaattagacttgagcacttttctaactcttagtctagattccttggctctctgttcctgagcagccgttcccggccagggtcccgcgcagacgtcgcaagggccgtgtcatgcaatcatcagttgagcttcccactaaagacacgcctatggccaccgagcgaggtgaaaatgaagcgactcagccatcttcttcatccgcccgagaatcttcggaacctcacaccccaacgaccaccaccttccaacagtcagatgcagactctacacagcccaccactccttcgtcaattgcgagatcacaggcacagtcgaaaggctcaaagcctgctcctgttattccagtggtgcccaacgtaccatctaccccacatcgccaagccaaagatggcagcgtcgcatctgggactcctaagtcgactgaacctgctacccctgccccagtggtagaatcggataaagccccttccactgaaaccaagacaatctcgcctgccccagctgcacccaagtcctgggctgatttggtccgttcgaaggagtcagcaagagcagtaagcgccgccgccgccgccgctttgtctgagccacacgggctacctgcccagaaaaacaaatctctcgcagatgttctgagcaaattgggagaagatgtcacacaatacagcgacaagatcgcgtttcttgaacctcggggactggtcaatacaggaaacatgtgctacatgaactctgtgttgcaaattcttgtttcttgtaccccgttctaccagttccttgatcatcttggccgacgtgctgcgcataccttccacagtgaccttcctttgatcgacgcgatgatcatgtttatgaaagaattccgtgttattgatgcggccacttccgaagagcaacttcgtctcaggttgaaacccaatgagcttgagcaatatggtgactctttcgttcctgagtttgtctatgagatggttcgacagctgccacgattcagggacatgcggcgcggacatcagcaggatgctcaagagttcttaggcttccttctcgaggaaatgcacgaggagtgcgctcgtgccgaaacgcacactgcaacaaaagaaggcggcgattcttctgccgatggctggttggaagttggccacaagcaaaaagcagcggtcacccaactgtctggctctcttgctgccgagtcgccggtcaccagaatctttggggggaagcttcggtcagaattcaaggtgcctggtaacaagacttctgttacattggaaccctatcaacctttgcaactcgacattgggtcgcatgacgttcacaacattcttgatgcgcttaaaggaatgacgaagccggaaagcatccaaggtgatttcaactcgtcgcgcggacccaacattaccgcgactaaacaaattttcattgagaccttgccccctgttctcattcttcatctcaagcgcttccaatacgacagtgttacaggtgccactcagaagatttggaagaaggttggatatcccctagacctggagcttccgcgggaggtcttcccagctcatcggcgtaacgccatggcatcccagggagggcccccgaagtatcgtcttatgggtgtcatctaccaccacggaaagaacgctagcggtggtcactacactgtcgatgttcgccggcaggaagggttggaatggatccgcatggacgatactgttatccgtcgcgttcgcagcgaggaggtggcagaagctggtggggaggaagaccctaaggttctcgctgccgctcttgagcagcacaagcacggcaaagtcccgaacggcaatattttcgaccacatcgatcaggatgatatggacttggctgacagcgacaagggctggagccaggtcaatggcaatggtaccaacggacatgcgagcaagaaatccgtgaatggagtcaccccacctcccgcggctgcctctggggcccgaactcccctgggtcgctatggctctcgtgacaacaaagttgcctatctattgttctaccaacgaatggattgagggttctcgcccaaaagctaggccattaggctggacatccattcttcaacgacgtattgaaaaaaagcatcatacccactacatcctgcgatacatcaagttctgtgtcttccacaaagtcatgcagtttgatcctcgcttcggaggacgacctgccgcctgtatcaacaggccatacataacatcaatcaatcttggcgagctcgttccattttttgtttacagctctcgcctttgcacatgaaacaccgttcacaacggagccatctggagagaggaagacaatctagggtacggcggtcccttgatgcctactacctctcacctaaatgctccttcatcatatctcacttttgctccacaaaagcatctactcaagactctgtcttgacccctttttctcttgctcgttttcagtgtgatgaacccgaatcatttgctacacaacccattgtcttttgagccaattgcttttttttccccgtctacctctgggctgtatcttatgggatattgacctcggtttatacccctctccgttttcacatggatacattcttcaaagccatcttggccctatcgcacactaccaggccaaaaaaagagtgagcctccgtgaactgttcctaccaaattctttatgtacttttgccatgtcattcgacatctggcgtggatacaggagatcctgtgacgaagtcacgaatttccttgtcttgatattgattgctctgtctgcatagaagggtgttgaagagggccggggttgttccggggcgtcgggggcgttgctgttgggggagaagggaggttaatgccagaagtgtggaggtttggagaagtgtggtgaatgcgagaacgcagaataccaggtgtggtatgtcaaaaagcctgtttttacccaaaaaaaaaaatttcaaaggaagtttcaagttatctccagtgtgtagtacagtacatatgtaagtaggtcccgtaactgatattatgtatactcatggatactatatacatccatatactaagaggatagaagatatctttttatatggttcgttatctagttctcgccgatagaaataacaagggtagttccgcgcttttcgagtaaaaaattcgctatttcttatgcgatagaaggctaggcctctatatcgatctatagagagaatctatttttcaagaggttcctccttaacttatataccactaagccggtggcggagagttatacgcgggactctataggtgcgagtagcgagagtaatagatatgatacctccctttttaaacgcctagtagctaataaaagcctaccctcttacttggttgaatctttcgaggattaagagcgaattggtggcatagtggcttgtgaatacgttagttatgactatatatgactataattatatatgccctaataacgtaatcggtaagnnnnnnnnnnnnnnnnnnnnnnnnnnnnnnnnnnnnnnnnnnnnnnnnnnnnnnnnnnnnnnnnnnnnnnnnnnnnnnnnnnnnnnnnnnnnnnnnnnnngtaaacgtgatactctatttcaaccactaacgcttttattcaattctactatttgccgatagcaaccgataagcattcttagtactatatatcaattttgagtaaatcgagaacttgcattgttatggtaacgaaaaatacattgctgaactctaggatatctatagatatatatatatctcagtcaccaatttatcaaatttctcgaaactccctaaagcgacgtaatattatatataaaccaataaaccaaaaggaaatgttcctataaacaaccgttgttgagatatcaagttgtaatttatcgcttttactatgtgttttgggctgcgcagctcgcttgcgtgcgcagctcgcttaccgattacgttatgacaactttacttagttctgtattaagagctctgtatgatcaaaaggtaatttttcttacatttacttacctttcttacaaaatcaatacacattttcacctagagagccctgtaatccgtatgtaacttcgatacacctgacctcgggagacccctggagggcttcatgtttgtagaactacatacgttggatgtacatctatgtcaactggtgcctacatacatatacatatatgccatgaatcgggatagcctcttctttaacacagcaacgttggttgctggggtctttgtccttgactatggtgcagacaaattcattgatcacactgtgattgtaggacagcgattgggcatctctccaactcttattgcccttttgactgctggagctgaatatgaagaggtaaattggtttgagctccatcatttaactagtctatgctaacaagctccccttagctcgctgttgttgtcgctgcaatcctacaaggtcgcacccctttagccctgggcaatgttatgggatctacaatctccaacatcctgggtgccttttcgctggggctcttgtgttatccagacgggggtccttttgataatagcgcgaagatatactctgcactccaattcttcgtcaccaccattttcatcatcttggcatattttcaacagctgaatagagttaccggtgggcttctcatcgctctcttcgtactttatatcgtctctattggcattgccatctatagaggtatcagtgaaccacctcagctgtcggacagtgcaagtgacgacgaatcaaccaatgtttgtgatgaacaaatgccagcgcagagcgcaggacagccagcctcggagacttctcctctattaggagatacgaacgtgccccaggaactaatagatgcatccgtccacaaggacaaaagacctcggccgctttatcatcatgtcctccaactgatttttgggctgctagcactctccttgtcgggatatatccttgcccacagtgcaggcaccatcgccgactctctcaatctgtcgggcactgtgtttgggttaactgtgatcgctttcgtcacaaccttaccagagaagctggttgctatgttcagcggctttcgtgggcagggaggcatagttgttgcgaccacggcagggagtaatatcttcctgctaacactatgtgttggcgttgtggcggtggcggggaactctctcgatcagtcagatacatttgttctgtttgatctggtcacggtttgggtgtcctcgctgtcccttgtagcggttgtctttctgggaccccagcgaatcgctggccttgtacttctcgctgcctatgtgacttttctagtcatggagttcacagtttacaagcgttgaaccagggcattcggctttggtgcaagtatcgcgagcccaatctaacacgaaagcccaagtgcacatacacgcttgtatcttatcgtcccggacgtagtcttatttatgtatatagaatgtaggtcatacctgatataacatacagcgaacagatgaatatatgcaatcaagcatggaaaacaggcactttagcctggctctccacatccccatccccatcctccacaaactcaaatccaagagccctccagttcaactccttcctccaatgaagcccatagtaccctctttcgtcctgtctatccaccgcagaagcatcggcctctccagccggttcaagctcatcggccacagggccaacaaccggctcggaagacaggccaccagtccctaaccttccacgtctggggaagataacagaccggaaccgggagagaagcatgcccatagagcagcacagacagggctcatgggaaaggtagacgtccaagtctgtgcaaaggtagccgccctgcgagcgggtgcgaatgcgcgaggctgcgggagtggtagccggggtagaataatccgcaagtaacacggtagatgggggaggagcggggggaggtgggtggtggagctgggtttgagaagggtctgcagaggggtcgatcgtcaaggcggactcaggattagcgtcgtcgtgcttcctcttcaatgggaaggacggagactgaggtgggtttgagatgttggtggatgtaccaggacggtggcggtataagaagtatgattccaaggcgctcaggtctggctgttctagttttggcttcgatggatctgcagtaggcgttaatgcaggcacgccgtcgagacgatcgtgttctcggcgccagcgagcaacaagctcgacagcacgcatgagtgcgtgcagttcgggcccgccctcaatatccgcgttgtatgtcttgctcgctgggttcggcgctaccccggggtgcagctgggcctgggatgacgcgcctgcctcagagcgggagtaccgcgcatcaccggcaactgcgaggactgcttcatcccattctgttgtagtgtcgtatccggcctcataggctgcctcagttatctcttcttcgatggcagggtcgactatcactgcgccgacgccgcggcctagcccggattgttctgcttcctctgccactttgcgcgcgagggataaatagtatcctgcccgtggttcaatggattcctgtgcgcgttttaatgtttgagggggcggcgcgacagttgagcggggtgcggctgggttgaatacgaccggccagagggtgttggtccatgtttcggcttgagttgtattgaagggcggggcaagggggattttgatggggtgaagctgaatattagaggttgaagtatcggaatgtgaagcttcgtctggcgtttcattcgtagttgggggatcattcgtagcggccggcgctgggtcaggcgcaaacggagcgagcagagccttgagtgtggtgatatcaggcaatggtggtgatatgaggacgaagatggtttgtgctggggccgctagacggacactctggctttcaatggctgccctcagccgcggtgggagcatttctcttttggcgaagcgacggaggtgggatagtggaagggaagggtctttggggaaagccgtgtcgatagccctgaataaggattgattaatttagcttttctaacctgtaaagtatgccgggtctgtagcttacttgatcactttggatgcagacttcactttgacttctgcgacaaaggcatcacctacttgtcggttaatcatgatgtcgccaaaagaaggcaacattgtaggtcataccgaattcctcctggggtcttgtttcttgaactgttcgaatgggggcgacttgcccttcgaggggtttgaggcctctgatagtcttttccacgtccattcttactatctcaaatggccggccaggcgcggggtgaaacagaatatatcaagataggttaacaatatacgaccaatgtcattgccttgaagtggttgtaaaaggcagtggcttagaattgcgcacttgatcatcaattgctaacggcgcaataattcagcgacagaggaagtacatgtattcatatgaggacttgaagaaaagaagcagctatacaaaaggtaagaagcaaacaatgcaaacttctaagggttgtcccacgggtttgccgctaggccgctttgggtctttttgatctggagattttcacgtcgttcgaggggtttacaatgtaagaaccgatagatatctagtaccgacgaaggggtttacaatgtaagaaccgatagatatgtagtaccgacgtaaaacgcggaaggtttacaatttcaaaagattatgagtggatatttgagatttgtatggtctttttctttaaaaaaaaaaaaaaacagtttaagataataggtgatttgatcgtagatatcacctcatcatcccgtaagacatcaaacgccgcccagtgaaaagaatcgctgaaaagcaggaacagggtattgcccatttggcctcttggtatgtgctgagacagatcccatgttctaaagcgccatgtctgatgccagtgctcctcgatattagatcaaaagtaatggtgcatcgagatctgacaccatcactcccctaatgcaagtggtatgtattaaatcacaccgccagtgactcggcgggtgacagaagaatccactcatccatggctgactcgagaccggcccgagtgatccagggcagaacgtaatttgtgcagatttcgcatcggcgacgtaattggggcatggttccagctttatgttgaaacaggaccggctgctggagcaatacccgttaccccggctttagcactgccattctggcagatgccttcaatttcaaacccgtcgcatcgatcgacaaggctctgataataatccaccaacacttccggttgtggaacaatgcgccattcaactcggaacaagaaatctagttcgagcatggccaattccgtcatgccgattccaccgactcgagcatacgttttattggtccagaaactgtcactgagtcccttgctggcgactgtggcactggtgatcaggaaccgatggatggtcagactggaaacggtgaaggcggggtacagcgcgcagagtcgatcgatgtagtagaccatgctgaggaggatagggggggagagagtagcatgggtcgtcaaccgctgtagataatcttgcacggagattcggggcggtgagcgcgagtggaagcgagttagacgaccctggtgtagtggaatcttgtcgttgaatcggatcagctccatgagcatgctggagatcagcacgaccatgtcacgcgggtcggccagttcatattgcgtgggcaacatcttgacatctggtttggaaggtcgcagacgcttggactgcgacctctccaaatctgcgccatcatattcggccggcgtcgcatctgattgatggctattgcgcttgttggaacccgaggtaggggcgggcatcgagggggcgggggaggagatcgggggtggatttgtagaggtggcagtcgccggggtggtggcagtcagagcggaagaagtggctgattggggggtcgaagccaaggccgaattattgaccagggtcttcaaagtgtcggatgtggatgcgcgcctgcattgaagatcccctgaagtctcaggagaggagggatcgacagtatgtcgattcaaggccgagcgaagttcgtcaatggccagacgcgaagatcgaggactattgaattgtggagcgccagtcggctcatagtgggaatgagaatgcgaccccgaagttgaaggaagcggggagcgtaatgcagccgttgaaggcgagggcgaagacgccaacatggttggggggggtgtaactaagttattaaggaatgctgggaatctgagcattcacagtgcaaggtgagaccacgtgggcgcacagtcagggcgcgctgtggatggcgtgggtgcacagccggcctcatcctcagaggctgaaaaggctctcacaaggaaagtaaaagggacacaagaggttataagaggcaaatattgaaagaggaaagaggggggtctgggaataatactccgaatgaccttggacaagagaacaggaagggggcgaaagccggtttgaaaatcttgttcagctgggcaaagttccttcagtgaggtaatatagatccatgcttttcagtggctagttgcttccggtgactgtattgttacagtatttgtaatttttctgattcttggcttgattattacatactattaactattacatactatgtaccctttaggtatgtattatatctcaacacctatgtatacatacgtacataactaagggtatgtagttgatactaggtaaaaaggaaggggaaatcctagataccatttagcgctcttgatatttcacataatatcaataagtctgtacttttacggagtacaccattgtatcgagccacgggaaagcgggggtagactacatgtaccctagctggattaagttaaaatgccaagaaaaattcaagtatacaattggttgtacgcatgtcggagttggagttctatatgcatctttttatatgacagacagctaataactgggattcacatgatctccctatatttgtttctataggctcaggtcaatagtatactgaacttactgtagtgttgcatataacatgagaactgaaaccgacgatcagtgccttacaatattgggctacttaatatagatcatagtacggagttgccccgtaagcgaatatttgaccaagatgcatccacttttgataccctagaagctttcctttgccccattatgcaattaaaccaaggctttatggacttcaatatgccctcttttttatgaacaggcaaaacgtctccgaatgtgtggcgttagtccagatgctgtcctcgtgacactcaacaaccaaggaatggtcaggattttcatccatgacagctcttattatataagcagttggggtcatctagccatgtgaccggtaaggctgaaggccggtctttcattaatccggggctactttttttgggaccggtgtgtcctggcagaaccaaagtgcggagtacctctaggcccagttccggtctgccatcatctttatgtcgtgcatccaggtctacacgatcttcacattgacggagataatttcctcaatatcattctaatatccctgccaattccttgattcaacacagtgaaacgccgagaacctcccgctgggagggggtgatcgccagatgatgacgcgagctgccgcaccgccgattctgctgcagctacagagcgccgaatcggcttcctctcagattacagctttgcgcactctgaagaatgagctgattggtcatgaccaacgcaaggaaacctacgtcgtcgagggaatcatacctactttggcacaggtgctgacctcgagatggccgggaacggccgagtttaatgaatcgatattgcaccacggccggtccatgccaaaagccccagaagattacgaagcatgccttcaagcaactttagtggttggaagtttggcacaaggtgtgtgaagactagatccttgtcgccaagacagacattgactgtactgagcaggtggtccgacgttcctcaccccactattcgccagcaacattccccaaaccttactttcaatattttcctccccagactgccccgattcattctgtcttcccattctacgactcttgaacacaatcgcagaccggataccgctgcaaagccaggaacaatggcctcgggacacgcagcttgcggatcttgtttttgcttctgcaaatattacctgtcttagacgtataatctcccaggagtacaagaacctgcacagccagaccacgatcgagctagcagccgccctgatcggcaagctttgcacggaggaaacccataagacggcactagcagaatccggggtattggatgccttagccctcaagattgcctcctttgtcgtggccaagggctttgtcttgccgggtgcggaggatcgctttcaagaacccggcgtattggaggatctgccacttccggcccccgaatccgcccagctagcaccgattctgcgcgcagttgctgtgatcattgaacagtcaaaatggagggcggagcacttcctgtcatcgcctggcattgtgacggtgtttccaaaacaaatcgctggattcgctccaacagacattaagaaaggtccgtggggatccacatatctgtcgggctccgcagtaccccgtcatcttggctccaaccccatagaacagcttttgccgtcggttcctctagcacatacaaaatcatcatctagctctgcgaatttcccacctctggggcacggaggctcgcagcgccgacacagccattcttaccccacaccattttcactagctgagacacctgtcccagaagacgacgagaatgccattgttccatggctgctgtgcattctccgctcagagaatggcatgacacggttgatgtccgcccgtcttgtcacggctcttttccggttaggactggcgaagaaacatcgcatcccaatgttcagttatctgttgattcccatcttgattcgtatgcttgacaagaatgtccgattgccggatgaagaaggcgctattcacaatgggctgctctcttcgagcttacgcttaaaagaagaggcgcctgccgtattagccaacctcgtcgtggatgaccaggagctgcagagacacgcagtagaaggcaatgcgctcaagcggctttcacaacttctcaaggagacttacaacccaatcacagagacctcccggccgatgtggcacgcagaggatggcccagcccgggaccttgagtctctttcaccagagtgccgactcgggccttctggttactcgccgaccctttgccatgtaatgcgttaccgagagaacattctcaaagctttggcagcactcgttccattcaaagacgagtaccgcaaggcgatttgcgaacatggcgtagtcccttacatcattgacgccctcaagccaagacctagtgatgcactggctgatgctgcgatgcccagaaataccgcagaggacggaaatccgatccccactattctggctgcttgtggcacagctcggatgctgaccagatccgtgagcgtgttaagaactagtcttattgatgctggcgtggctaagccactatttgcccttcttcgccattccgacctcgaggtgcaaattgcagcaacggctgcgatctgtaacttggcattggacttcagtcccatgaaagaggtttgtgtatctatttcgttcatagactttgcagctaacatgctcttcttttcaggcaatcatttcccacaacatcattcccgtcctttgcgaacacgctcattcatccaacaccaaattacagattgaatcgctctgggctctcaagcacatggtttatgacaccgcaaacgacatcagaatgaacatcatcgagactttgggtcccaaatggattatggaggtcatctcccaggacccggtccgcgcagtggctggacggggggtagaagaggaggcggatcaaagtcccgggttcgccatgggtcgatccaactcagctggcgagcaggtcgatattctgaaccccatggaggatgcagcggagtgggacgaggacctcaagatgaccgataccatgcctccctccaaaatgagtctggacatgttccttcctgatgcaagacgtaggcgcaaactcgttctgcacggaactctggctcaaaccacacagtctcgacaggacgatatcgccgtccaggagcagacattcgacttgctgcgcaacatgatctgtggtcgggatgcacctgagatgattgaatatctcttcagagagcttggtcaaaatgagttcctcgatacaatcgcagatacgctgcgaccacgtaccatccaactgcctcaccgccgagactccagcagtcggtccctccatgtccctaatgagatcatcaacgcagccgccgctctcatcatccacttggcggccggacatccacgccaccgacgcatcgtcacattccaccgtgagttgctacggtctctaggcaattatttcaaccattcccacaaagacattcggtcgaactgtgtctgggtagtaatcaatctcatctacgaagaagaccagagcgatcatgaaggttgtagggagcgggcagtgagacttcgttcccttggttttgcggaacggttggctagcctcgaggatgatactgagctggacactagggagcgtacgaagactgcgctgcatttgttgaacaaactgtctcccgcatagtttcatggtttcatggcttttttatgcttagagttacccgtggacgttctggatggattggagtactgtaggaaaatgtggataattatcattattattattattgccttctcttactgtgacgatcccgtctgatatcctaactgaatataaggtcacctcaatttaatgaatatgtgcctgaaagctgtaattttcagaataagcactccattctcgatgtgggggaaaacgtcatagccctttgcaaatccggtctattcacatttgtccatcttaaatatctgttcaccaccagtctagttctttctaacaaaaatctagtgatgtctccagtaccagaacccatccttcaagccctctcactcccatccgaatcaaaagtcagcctctcgacatccggcctaggctcaggcttcacaagcacaggtatcatccacgcccagatccccggcaaaaatggcgcagaagagcgacgctacttcgtaaaaacctcatcaaatggcaaagctgcagaagaaatgttccaaggcgaatccgaatccctcaacgcaatcgcagcttcagtaccaggattctgtccgcaagccctagcttgggggccactcgacgaaccagggacaaagggcaaaacgcacttccttgtgacagagttcctccagcttggcggcaagatgggccgcagcacgagtgacgaaaccacgctcgcgcaccgcctcgggagactacataccactcccgcacccccagatccgaacaccggccggcgcagattcggatttcccgtaccgaccttctgcggagataccaagcagcccaatcggttttgtgatagctgggctgaattctatgcgaatgaaaggttgcttacaatcctggcgacatccgaagagcgcaatggacccgatgctgggctgcgcgagacggttgagaagacagcgcataaggttgtgcctcggttgcttggggttggtcatttagggtatacttccagtggtgagggggagggtatcgtgcctgttgttgttcatggggatttgtggagtgggaatgctgattggggtcggattgttggctcaggtcgcgatgagacgccgggggatgtggtgtatgacccgtcggcttgctatggacatagtgagtttgaactggggatcatgcatatgtttggtgggtttgggtctcggttctttgatcaatatcatcggattgtgccgaagactgaacctgtagcggagtatgttgatcgagtggaattgtatgaattgtgagtttctttcttctcttgctgttggacaattactgatttaatcggaaaaaaaaaaaggtatcatcatctaaatcatcatgctatttttgggggagggtatcgatctggtgctatgtcgattatgcagaagttgatcaggaagtatggaaaagactagagtctgatagttcatgcaagggtttctacttttctttttcctttttttctttttcttttttctttttctctattattttcattatcaagccagtagggttaaaataacggacacgaagcagcagaaagaagagtaactagataggacgcttagaatatgatgtcacactaatatccgaggcttgtccaactgatccctttctcactttcacctttcacttctctattaaagacgtcaaatttcatttcgcaatgccggctcatcctgattccaacctctaccctgaggccagcggcccggccaagacgctggtcgatcagcatcgcgctgaacagccattgaagctgtatgcggggtggttctgtccgtatgtccagtcccctctaatcttatacaaaaatgactgctaacatggtacaaagcttcggtgtgtgtccaaccactcatccataggcaataatattaacaaaacaaagtgcaacgagtgtggctcgccctcgaagagaaaaagattccatatgaatatatcgaggttaacccatacaacaagccagactccctactcaaattaaatcccagaggcctagtccctacactttcaacgccagcaggtccacacccacggccactgtatgaatccactgtgattctagagtatctggaagaagcatacccagaccataaaccccgcttcctgccagaggatgcctacgagcgtgcccgcgcacgtatctggattgactatgtgtcatctcggataatcccatcattccaccgtttcttgcagtatcagcctgcagatggcagtgcccagaatccagatgcggggttggaccaggctcggcaagagtttttgaatcacctgaaaacctggactaaggagatgcacgccgaagggcccttcttccttggtggggatattggtctaccggatctggtgctggctccatgggcggtacgactgtgggcgtttgatgagtttaaaaatggtggattgggaattccgagtgagggaaaagggggtccggaagaggagatttggagccggtggaggacttggctggcagccattgagagcagaaggagtgtcaaggagaccactagtgatcttgcccattaccttcccatctacaagagatatgcggataatacagctcaaagtgagttagctaaggcgacacgggctggcaggggggttccttgagggatttatgagacagtatcctgccattcatgtatatccagcatgatcaatatgtataattgcacatcctctccagggaatagagaatgacggtacacacagatataactatacacttcggaatacgggggaatgtacttccgatttgtccacacgtgattaagagctcttggacggacacgtgatcgagatatcaatccagtcacttgttgcgcgtcttcatcttgcaacttctaaagatattgcttgatattgccatattttaaggaaatccgaaaaaattgccatggcacgcaatatgagggacgagtctccccgcgggagctcgacgctggaacccagcctatcagtcccagtcatccacccgtcttttatacaggtggccaatccatacatattcgaacagacaattgaaaactgcattgaggcaatgaacgtcaatccccttcgcgaaacttcattgcgtcttcagggcgtggcatggatcgacagcgtgcggagagccctcaacctgtaagtcgtttccaagccaggcaagattcatcagaactgactggaagtccagtcccattcgcactttcgacacggcagtgggatattaccaccgttttagactggtgcatccagacaatgagtataatttcgcagtgagttttctcgggaatccgtcaaggagatcaacctaacccgggatacaggatgctgcggctgcggctctattcacagcatgcaagatcgaagatacgcttaaaaagtcgcgagacattgtctgcgcagcgtacaacttgaaagtggccccctcggagcatttatcggctgatgatcccgtaagtcgtggtacaagacgagatcagacccgagaattaacgcatgtcgctagatgtttgaatccaatgcgcgtggcatcatcggtctcgaaagactcatgttagaggcctctgggtttgactttcgaacccggcatcctcataagaccctcatgaagctgggtcggcattatggactactacaaaactccgaagtctccaatcttgcctaccgcatttcaacggatctttaccgcacatttgcacccatcaaacaaaactcatcgacgatggcttttagctgccttgagcttgcaggacgactcttggaccagcgtgtcgaacaagtagagtctgggctagactatgggcaatggagcaccagccgagctgaaatcatgggtaagtattgttattgcctttgcatacatctagtgaataccacagtattaacaataacccagaaaccctcttcgatctcctagaactctacacccaccaccgctcattaaccgccgtcggctcggaattcccagcagaccggttcctgacagtccgcattccactcaaccaagaagccagcgaacacaacatcccgcgctaccacccgtggattggccagccacgcagaccatccaacggcactgggcccaatgagccagatacttcacgacctgctcatcccttaacaccaattgccgcgaacggggaccgccagaggacaggcgagcgaggccgtgacgctgcggtgcgattcatgctcgatcccgcatgtgcggatgaggagaggcgacaggtcgcagcgtacttcaaggttgaaatggaagaatatgaagtagatggctaagagatggttcctggcacctggcgtgcctcatgcagcgagcgcagccaaaaaaaggtattggtccataggaccaatcatatagcgggcttggtgatgagcttggataagggccctatacatactacatcccatcttggtttcagccaagcaatgctctggtcacggtgactcgctgtcggctgttcgtcctgattcttattgggatacgccgatatccttgctaagctccgatggggccttcgaccgcacttctctggacagatgggcgaaacaccccagtttcttgctctgcagtttcggaactgagttatctccaacacgaggctggtattccagaaatttccccttcttgatccatatttcccacgatttcccgataccccagacatctatgaccagcaacgaattctcgatagacacaatgaaaaaatccattaactatcgataattggcttctcattgaaggacggcaccatggttgactttcgctgtacccggacctatctagagtgaaaagcttcaaaatttgaattgaaagctatgtacaaatctacggtccattcccttcgcgcgtcaaaaaacagcgaagctagagacaagaccgccgacgcgaaacagacaaaggtgtccccatcatcccctcttcttctaccacttctgtagagagacccgtccgttccacgcatcgggagtatagcagagctcaaggtcaagatggaccgagcagcacaagtcatcaaatttaggtccagtccatggcccggcaacagtcagaaagagaagagaagagaataaaaaaaaagagtactaaacaaaagtacagggaaacagtcgtaagtgaagaaagaaagaaaagatcgcccccgtgcctccggcgtggaagatgttcgctcttcgggccggttcattagagcccttgccacgggtggtttttgccgggtgttgatgccgtgttgaaaggcggtaacgcgagcggggcccatgtatgtacatatcatgcatgcacacattggcgcttgcatgcatattcggtgaacccaaatcaagtcccgaatgaagcaagaagcaagaagcaagaagcaagaggggtcgtcggcacagaaacaatcggaggatagttgcagggggaaagcgcggggttgaaaggtcgtcctcgaatggtagaagtcaaagtgaaatatgagtgtcataaatttgggtgcgttcaatctgaatgccggataattttaagttcaccgacgcttgagctcagtgaccaggcaatccagaatctaggaaaggttagtaatatgatcatggtaattggttgaaggaagcataccgattctgagacggcaccctgattgtacaagtacttgcccaagccacgaacgacctcgagctgctcgtcaactgtaagaccgttgatggcggtctcaatgatatcgcccacgctggccttgtagacagcaatgaagctgtggtagtacatgaaagagaagaagcccatgatgaattgacagtccatacggtcagtgataccgccgtggccaggaatcgactcgccaaagtccttgatcttgaaagtgcgcttcaaaccagaagcaaagaatccaccaaacggagcgatcagcgaagcgaatgtggcgaaggccaagatgtggaactggataggttccacccagaaggtcttgtccaggccaaagacttcaagagagtacggttgcaacgtgaagaccgggttcggaacacattccagaccggtcagaacattcgagcccagatcattgactggacagatgaagtacttgtagcggatcagcaagttggtcatgaaataaccaaaggcaacagtgcaggcccatgcgccaaggaatccctcaacagtcttcttcggggagagctgaatgagttgtgtctttccaaagctaataccgcagacgtaggcgaagatatcattggtgatgaccagcgcggcggggaggaagaaccagatcatgccctcgaaaatgttgttcatgacgaagtgagcttggacaacaatcaagtacaaagccatatgggtccaagcaaactgggtgaattggaatcgatagtggcccttctgcagagatccgacaaagaacacgaatcctatcgaccggggttagcggagtaaaaggggaagggtcgaaacacttacccatgacgtaaagggtgaagctgatgaagcggtggtggttcgccaacggaagtagcaccttgtcaacaagcaagatgtgcttgaagtagtaaatcacgctctctccgtacaggaaatacatagtggtcgccaagaagtaccaattcaacgatttggtgaaccgcaagttcttctccttattagggatactggcgatagcgatgacttccttgaacgagataatttggatgccagtaattagggcaataatataaatgtgaccggaaaacaaggcaacgaagaaaccggcgatcatcacaaatgtccatatcgtccgggtgatgaaggtctgcttcttcttctcatattcggattgggggggtttctagaagtgaagatcatgtcagaccgaaattccgaggtcatacttgtgctatactgaaatctaacctcttcagttattgttggtggtttggagacgttgccatttttgccggggctagtgggctctgagggtgcatcgctgacgtcggaggacacactgagacgtcgctcatcatttgaccggtgttgaaatctaacattgcggcgagatttcgacatgatgtagaaaagggggccagaaacagaattctggacaatagaagtggagagtgcagagagcgagagaggatcatcggattagaagttcatgagctcatgtgaagtgccgaaagcggtcagcttcagcttcagccccgtgtttactttactctttttcttttttttttcttttttttttttttcttggcttgtagttattatacctcggtgtatcatgcgggtttattgagtcaatcattacttggccttcaagtattacattcgtgactagaaattgaaattggatgtgcaagggttgtcatccagctgccttgaactgccgtgttttctctctccctccttattcaaccctcggaaccactccaagtcgagaatgatcaaaagccctccgtgaacttagaacccctcgattccctctggtagtccattcatggcgggggcatggaagacgacgacgacgactacggctccgatgagttcgactccctgccaccggggacgttgtatgagctggaacagaatgcgttccaggcaactcaggcatcggcctcacagtatcactcaaaacccctaagtagcaaccccttgctacgcactcaagcagtgccattaaacaacaatgctggatcgctgagaccgccgcctcgcctacataccgggttgacgaacgactacaatacactggaggtgggggagttggaagccgaggtgtacgataatgtcgataaaccccatgctattcctcatggtcaacatgtgctcgcaacgaatcctcgatttgcggtcaacgagcagttgggcgatgccatggatgtggacgagtactatgggcaagggaacgccgccgctgagctcaatgcacgcctagtacaggtgagttagatgaaaatttctttgtataaactctaacaaccttcatagatggagcaagaaagagaacgaatgttacaggagttagctgaagcgaggatgcaagtggaaacgaaggccggtgaaatctcgatcattcgaaggaaacaggcgacgatgacccaagactatgacctgcaaatagcgtctttacggaaatccatggccgatgaaatggcgaaacacaagcaagaagttgaggcagccatgtccgaaggcaagatattggcgacggagaatgtatttcttcaacaggatctcgtggatgaagcctaccagcttcgaaactacaagtccaagcatcgcgaggtggaagccccagtgacgccccgaaagtcccgggttcttcccttccgcgatggatttgatgatgatgaaattgccatgatatcgcccagcaagtctgcagcacgttccaagcgagccacgccgacagtcccaggaaaacgtaaacggcaatcaagccaagatgcccctgcgccactgcagttgaatcctgctggcgtggagcttattatggccgatgcgactgatgctccggccgaagtcgacgtggcgaagcgcaagtctgcagaggcgggtcgcaaccagcgacttatgatgcgacttttgagccaccgtacgcatcccaaccaagaaaccgatttcgaagccatggccaagcttgcatttccctcggaaccgcatcgacccatgtccagcatcattatggaggtcatggctcgtgccgacccgagcagctacgtattagaatacacgcaaacgattgcctcgctatggcagcgcgccatcagcgagaagttctacgagccgatcccccgatttgaagctatcacaagatacagtttgatgtcggatgatgtcccgctctctgagctgatcacacctttagtcggagtcttgcaagacaccgtggaagtgaatgcagttcctcgcttcaagtacgccccggcatcgcgagataagcgaattactcgacagacaccacaatcagatctgcagcccctggttgactcgactggggccatgcgtttactttaccaaatcgcctgcggagtattgcatataaagagtgcaatggagacattctggcaaaatatccggatctcgttcattctcgtgatgctgcacccgtcacatccactgggtgacattgtgcttttgatgaatctcctgtcaacaagtattcgagcagactccttcggtccgattaggacttctgaccaggaccaattggacgtgcaaaagtggattgtggaccgcctcacacacatgctgagtgagcccgcaataccggacgaagggatagagccgtacactgcatacgacatttgtgcgatgcgcctcgaggtcctgctgctgctggaatcgctgacattcaaccctatggccccatcccaaaagcatgccagtatgatcctcgcattacacccgaatgcactcgctcgtttattccggtcaatgcacgatgagctggatgcactttactcctccccgccagagtcagacctgcgtgttgcactggtcaatggccttatgcggctgattttcggggtcatgcggcaacatggcaccttgatcaatatgcaggagaagctggcgtgtgtacctggcagcaaacagaaacatctcgttgtgttaactcgcttggcgttttgcgatgggactgtgctggaggcgggcatcgatgatgaaaccgttgatatggcgcacgagctactggaggaatggactaatccccaagaagcagagtcattagcggaggccttcccaagttctaggagagactgacacagtgagaacaagacgtttaatgttgaacgactgggagttttgtatgcatttgacatggcgtaatgagttctctggagttactagcatattcctttaccatataccagaacaatttcattttcttttacaagcattcaagatataagggaaaagctacagagacgtagctccataagaggtttgagacatccaacagacgtgagctgcaacagttgcagggttttcactatccgagtcccattactccagcaggttcccacctctcagtggttaaaactgtgcagtaagggaccaggaaagggaatcaagtgggtcatgtctagaggataggggcttggagacattgtacaacataggcaccacacgacgcgtcagacacgtcctggtgggatttctaggagggacgatctgtcagagcttcatcgacagagtcaacaacattaaggggccatgagaatggggagatccttcaggggaggggagagcatcgatagaacacaacaaggcttcctggtctcacttcaaaggcctatcatgactacatgtacagtgcttcatatgccaactacgaatatcctcttctccaagatcgagccactggcccaaggattgatgaaaagaaaagactccacgaatggaggtgccaaagaatacgcctgtcaatgacccataaagaaccattgaacagactgttccgccacgctgtgcaatgcagggaccagtctgtggtgagaacgtcttgttgatcacggtcacccaaacaaggtaagtatgaagaagaaagaaaaagagaggaagagccgggggccaggcgcctatatatacccctttctacagggcggtggcagaatctgcccaggcaaacatcgagttccccttacatgatatgcaaactagacaaacatccaatagttagttaagttatctgccgccctatttttcaggcatcaatttcctagcagtcacgtgcattgaagttttgagactctgccaaattggccctgggtaacatattatttgctacagcattgtgtctaacgagtcgccacaatgagaaacagagccagcaacacattgtcgaaaggcgtatgtcttcctactatactgggttgtcccaattccaataaggctaacaagacactggtcagaaaatccgtcaatcatggagcaaatacaacctgtataacatgcaacgattccgcagcccacccaccaccaatcgcacattcttccagcagaaatggtctgctaaggctgcctcccgtgcctatcacggcgagcaggtccgtgagggacagtggaaacgcatgttcaaccatcgcattcgcagtgttatcccgatgaatgcatccgacttggccgctgatgacggttccctagtctcgtccggccgaggctcaggacttgataagggtggaaagcccgcttaccagacacgtcctacaccttacacccacatgacctttgcacccctggagcgccggttggatgtagccatcttccgagctctgtttgctagcagtgccagacaggcgagacagttcgtcatccacggagcggtcactgttaatgggcaaaaggtatgatgcgatatgggaagctaccgattccttgattactgactcgcttttgtgttactagatgaaacaccccagctacctcctcaaccccggtgacctcttccaggtcgacccagaccgtgtcttgtacgctactggtcacacgaaaactccgtacgagcgacgccagggccgattgactcggagaaaagctaaggccgagagctcaaagggagccgaggaagccgaggccgcaccggagaccgccaaggaagagaccaaggagactgaaaaggaagatactaaggagactgaaaaggaagatactaaggagactctcaaggcgcttctggcacaggctaagtctgtcatgtctgcaggcaagaacacactcgcgccccagcgcaagcaggagctacgcggtttccaacaagccgtccgccgcgtattgtcccgctccgagtccagtaccgtcctcgctgacagcctggaggcccagttctcccagctaaccctgcttctcaaggccaaacggagcgagaagccagagaagaaggatgtgaagccccgtcccgaagatgctttcgccaccgacaggggagatgcagaggtggcttccgcgaagaaagatacagaagccacagccagcgacaagctctccgaagccttcgcgcaggcaacgctgggtaatgaggtggatgcctcggaactcagcgacgaagagttcgacacgctcaagcgcgcccttactcaaatgcgcgacaaccctctcgacaacagcaagacctactccaccccctggcagccacgccaatacatgtctgcttttgccttcatcccgcgctacctcgaggtcaaccagaacatttgtgcagccgtgtacctgcgccaccccgtggcccgccccggttccgccgaggtgcccactcccttcggcgagtccattgccactccggcttatggctggtacctgaggagacggtggtagaggatgcgattggcttgtctttctctgcctagcctgtccctatctcgtttctctctactgttctactgttctactatttttctctcccctaaacttcccgtctgtgtattagtgggcgcttagatctccctccctttctgcatatttctggatcatgttgaccatggtgttggttcctgttttgcttgtctttggggctctttgtgtcagctctaccccctgtaccaccatagccatgatgtgttataaatggatatattattgaagctattgtttcatgctgtatattggccggtcatttgtatggtccttgagtagacctggcgactttcctcccttgttgtgggtggatattgtgccaaacagcctgttcttgatgtactgctggattctaaatccatagaagatattaagaaccttacgcaaagttgtaggaacacgataatactcgtaggcaattacctacctccaacataaagttggtcgagtgtccaatatatactcctccgtacaccgcacttatataaatatgcagccaatggatactacctaggtagaatcccacaggaactctataactcaaacggtacatataattaagtacaatctaaacatcgccaatgtgtaagattgtccaattgaagctctacaagattgtatagttagccagagctgcaatagatgcttggcgcacggacccccctagaaaaccctcaagtgaaatccatcgcagctttatctttatccccacagatcgacaaggacattctacattagtctgctacactattgtcaccctattgatggctactttgaactaaggaggctatctcctggaccccataggccagccaacttgcactgttggtctcccatagcgcctgttcgactgctattgctactgcgaaagctgctatcctcatgacgcgcattcaaccacacgaatacggccatccttcgtaccaccctccacaaaattcctttggaacagtaccatctggcctgcgctcagggttcagcccagcctctcagtccgtgtctgtggtagtgaggaatccacctacgtctgataacgcatcggcgagcagcgaagagacacctggaggggcaaatctgaccggaagtgattcacgtgaaggagacatcctccaaaccgatctatactatgcgccgatgccggtgggcgtagctcaagccagcgaaggagatggatcaagactgatgtcgggaccgaccaccaacagagggacgaagcgcagtcacaacggcgacgatgagctcaatggcgacacttcacgacagcatagacgtctcaccaccaaagaagaagtagcgctcttcgagatctgcaaccgaaacgcagacaccttcggcagccgcagtaatctgtgcaagtggtggatatccattgccgccgagttcaaacgtacccatgagggccgttcatactcgtggcattcggtgcggcgcaaagttgaaatggttacgaggcagcgcatcaagttcctggaggaccagagacagcggggctcaaacgcacccggttcgacggccgaggaattgatgaacccgcaatggttagctgccgtcgatgcctggcttccgacctggcagcggtgggaagaatccgaaaaccggcgtattgcaaagcgggatgagctcaagaagcgcagacagccgcagccctggcgccagaattcgaataatggagaccaggaaccatggcggaacctggctggaccatctgccactagcccgactgatgccaacggcgcaatgatgggtatgctacaccaacctattgcgaataacgtcggtgacgctaccctcccggctaccagccccacgccttcgccctcaattactggccctgcaccacccgcgcatttcctcgaatcaccctccacccctgtctctgcgagcacatcactgagactgccaccgggtttcgagaatatgttctcaaccccacaaagcacatcaaaagtcgcgccccttccctccatatccacaccaccagttccacaacccgacggccgtatggtctcagccgtcctcgaaaccctgggaaaactcaacaaacacctagactccacatcggggggtggtatagacccgagtgtcacctcacctgtgatctcggccttggtgcaggccgcctctgaaccaccggttctagcttctccacggcaatcacagcacccgcaagtacagcctacgttacaaccacagccacagcaaggtcctactcacacccagcttgagcaaatgaaggaagagctacgtcaggagatgcaggcccagtttcgaagcgaactggagcgcgaacgtgttgctatggaggaaaagctggactctgtgcagcggacccaggacctgattcttgagatgttgagacaagagcctgcttgatgcagatggagtcttaagtcttgtactttttctctaggcgtggcttgtgttgtctggcttctattcttacttgtacttctactttcnctttttctttctgatatgatacccattatcgactgcgaaggacggcgggcctgccatatcttcgagagggctgatattgctacccaagtctttacttgatattctcgatgaagacattgcaagactacttcctaaaatttgacgagcttgaaaaggacccagccgatggcaattgctctctactctagaacagaaaacaagtaaacaaacataagagaaaatagtcatcgggctaaattacagataaatgatagaacgacccaagaattccttcccgagccttcacacaacgattaaaagctctttcacgatgcacagaagtgcctatagcgcgaaacaatctagtagtagaaggtctcatcgacggtacgaccacgcatccacttgggctcagagccacggacgtagatgtcctcgaagagaatgcgggaagtgttatcggggacgggcatcttctcagcctcggcgacctcggcgtcgacgttggcacgggcggtcttgtcgagacccttgagctcctcctcggaggtgacgccccactcgagcatcttctgcttgagaccagcgatggggtcatgggtgctgcgcatgcgctggatctcctctcggctgcggtaggtggtaccggggtcggacatggagtggccaccgtaacggtaggtgacgtactctagaacgaggggtccgttgccggtgatggcgtagttcttgctgtactggacggcggccttggtggcaaggacgtccatgccgttgaccttcagaccggggatgtactggccgcgcttgtagtactcggtcagagcggaggagcgagaggcggaggtacccatgccgtacttgttgtctagagaaacataaacgttaatacatctgtggcttttctgaggctgtaaagtcttggaatagaccacttactctcacaaccgaagagaacgggcaggttccagagcttggccatgttgaaggcctcgaagacctgaccctggttggaggcaccgtcaccgtagagaacgatggaggtgttgggctgctcgttgtactgctgggcgaaggccagaccagcaccgacgggcacctgggcaccgacgataccgttaccaccgtagaagttctcggcgaacatgtgcatggaaccaccctttccgtacgcgataccctcgcggcggccgagaagctcaccaatgatggacttgacggtaccaccacgcatcatagcgaaaccgtggcaacggtaagcggtaataaccttgtccatgcgggtgatggcgtgctcaattccgacagcgacggcttcctgtccggtcgacagatggcagaaaccccggatcttcttctccttgtacagacgatcggcggccatctccatacgtctgcaaaaagaacgagcagtcagtcaacggctagtccaaaacatccgctattctgcttatcgtacctcatcgcgaccatgtcgtagtacatctgcttgagctccttcttggaggtctcgagagtgtacgagggtgggtcgagctcgtaggtctcgaagctctcatcggagagacggacagtgaacggcttatcatcctcctgttaaagcgcaagcacaagcatcagcaattgaaactccggaacctttggggcgaggtttttcagatcttccggatagggctcaacaaacctgcggcaccgggctctcgacgttggcggaagcggcgtcggtggtaacagtgcgacgggcaagaggagtgaaggcacgacgcctcaagggcgcagcctgacggaccgcagcacggaagagcattttgtgagggaattggagatggtacgttgtagatgataagcacctttttccgtcccaacaactctcttcaattttgccgtcttagtcagcttccagatcggggccgcccggtgaggaacgtcaggccggctccgatgttaaactacttgacttcgctgaacattgattctcctatatttgctcggatatttcttgtatctggtgattaattcccttggaattatcaaaatgggccatcgcagttaacaaatggcatctctgttgtgcttgcctgagattttgttctggtttcgatctccggtccaaccccaacggttcgattcacctctatataccatagcaacttcaaccctttggcgacaagaagatagaattcaagatcctctggggaactaatcacctcttcgatacctgtaggtcattggatctgcttgtagcgagcttaacaagcaataatcttctagaaccaaatatatgttgcatacaaggctgggatatatcagtgatcaagagggcaccatactaacaacctaatttggtaaacggtcaaaattacattagcagtcatgagaacagagtctcagacaatcagacttgaatatgccaaagttcgaagtatgtctgttttcgactgtgaggcagaaaaaggccacccccaaatggatatcaaaaggcagttgacaccaaccccaaggtctattgagacgaatagctattgagagtctcaaaaggcaaaaccgtccttctcacatgtcctcttcaacaactccaagattcttactcatatgaataagatcccaagatgatgctttattgactttattgactctattgactttccaaatggaagtgcagtttgttcaggcactgcgtgtcgaaggccgggcctcattatttaaaatgctggcttctcccttcattgtcctcttttttctttgcatcagcttctgaaccggtgtgaccaaggtatctttgcaccatgcctctatctaaggacaggaagctaacaaacatcaagcagcaccaatctcgatatggcggaatccactgccagcgcaccccttccgttgggtcctcccgctggccctcccatcggcactgctatggaacctctggttgtgttcgttgctcgtggcgctccgggccccacacacgtcgacatcggccagatgaagtactaccttcgtcccgccctgattgagctccagggaaagttccagcgcaagtatggggatctggaaggacgttcctactgctactgcccattgattcataaatcaatcacccaccttgagccagattccgactcgttcaagtctctgaccgatatcctcatgtatggccggatccatagctgcgacatcatgtttgtcttgaaccactgggacgccatcacctccgacggaccgagctttgccaatatcttcaaaggtttcaccgacgtcaaagtgaccattcgcgcccacggcacgatttcagcggaccacaattgcgaattccacgacctcgacgcccacaaagtcagcgctcactaccagggcttgatccgactggaagaacagtttcttattgatgatgcactgcgttacgtggtcagagtcgaagaagtccgtggagtcaggatcggagtggaggagtcggttaccctgatgagggacttgactggcgaacctgaggaacagctgctggagagagtgcagtggttgctttgatacagggaaaatgaactgaggaaatgggctcttggatattcatggagatgtgaggaactctgacgacggacgttttccctccatgggttgagacatgtgattctatgccaaagttcctttatccgagggttaaagccccgattgtaccttagcgccagctttgagaaagctcacttacaacgcccgagcaagccttgagctctgcttgtctttgggatcaaatgaaaccgttaatacattgatatctctttactttcggtaaatgattatttgaagtatcgtacggtgtagaccatggatcgtgttcgccctgaacgtcttcatttttagccaaagccgaaatcggttccatcatgggttgtatatgagaacccgtggagctgtcgacggccaagcaattgcttacctatgtacctattagaatccattcatactgaccatgaaaatacaagtcaaacctcatcaagagctttaggctaacacaactctgcctacacaccaatcggacgacacccatacaccacaagcgttagaacgctgttataccaaccatacgatctcaacagcttgcattgtgtagggcgttgatagccgagccaattgaaacatacacatctaaagtacgaactcgacacgtcataccggcacaatcaaagccgttgaacaaagatcaggaaagacatgtcgtattgacctaacgctcaaacgaaatacgtgtcaaaaagtatcaatgcacaaagtacggagtcaagaacagatgtatccgaaattaccccgcgagtgtaaaagtgatggatcttaaacacactacaacatagacgccattggcactccattggcactatcgggggaaaaggcaggataccaaagcccgacatctgaattggcgaataacgccacgtctccatcggttcgtgcattggctcaagtttatccataacttagttatattaacttatattaatttattccaacggccacgttaacctttacaaatgatagacctgaaacaccgtgttgattcaggtaagttcaggtaagacagattgcgatcgaataagactcatagtggcccaagctgatgggattcaagccatcccgccgtaggacccttacctactccgtaccttgtgtgagggtctgtgtgtgagagaacgagtggtgaaggagcaccctaaaggatctgaaccatccgcttgcacggacgatctgcgttgcaggtgtacactggactacccttttctgaaaccaacccggtcgattgtagagctatcagcgtcatcggacgcaccgttgtcttaaaaagacacattgacttgtgacagaaatcagttctggattagcccaaccccgaaggatctatatcctcgtcatgaagtagctgcagtctactgcatctactgaactttggtcacaatttcaagtcctcgagtcttttatgctaacgattatcggttcgggatcagcctggccaatgagacctgcatggatatgcagttacctgcaggtaggaaccaatcaaccgtatttactattaagggattacagggttgcatttctaaacttatgtatgtacggagtgcggagtacaaagtaagagaatgctagatgatagcccggaggtatcatggtgattatgtcacttccaagttggtcaattcttttacaagcgactagttcgtactctgaaacactggaccactacaacatacagaattgagaaagagggaaaggatcaaccggctaaaaggagttagactgtgtttacattactatctccgctatggaaactttcaacggtgatgatcattgatctatgcgcttcaatatccaaagtacatctatacatatatgtggatcgttgtacagagtactccgtattgttgtaagaagaatagccgtgttaattttgacggtctagagccaacacagccaactgagctgtcagatagggtttgccacaactctatatgcctagacttgacagctccagggccgagcagcaaggatttgttaccagtcaactccgctcttgtccgttctttgtagttgcaattagcctgcatagtaattctccgacgcagatgacgcgcaggccagcatagggggtgtaccgacatagtttgtgatagatccaatatcaaaaccccacctcaaaagggggaggcgttgccaatcgtcatctaccacgaggatttgacaatttatgcagagcactcattgacgatgccttcggcaagccaggattccgagacaatggagaagtagctaaactgagcacagacactgtgcagcaaccaaaaaaccagaaacatagaaaacataggagtatgtcgatcaccgcgtaaacgacattcgcacccacccgggcaacggaacgacccataaacggggagctgcagttaatgatgtgcaaatcaatttctcctagtttcgcgtctcctattactaggacagatgatttaagcgctaacgagtgggacaaaatacgatagacccgccggtgtcgaattgcaggcgcgacgagggagatcaggagttaaagcgaagacgagccacaccaattaggccaaggggattttctgttgacccttgacccattttctgggagctcgggaagtggcctaccatgtggcttatagcagaaaatatccgttggagtccgctgctggaggagtgatcgtcaaaactccggaggagtgtctatacgcccatttaggatatccaaagccgaggaccaattttgttgttccaggtgtcacacggacttgggcttgaagccggggtaaagggtaaaccctggaatagtcgaagagaaattgcgtcattgcagaaatgatttcgaccaaaggaataaagtctccgttttccagaatccccaggacaacttttgacagggaaagcccggaggatcgacagagaaccttgggaatttgccactgttccaggagcgtggtccttagccaatatagggtgggtatacggctagtggataaatgagccgcctacaaccacgtgagtcggtaattagtatattagcggatattaaattaatccgatccgaagtaaatccactcgtcaaccttgttatcaccactcacggatttaggtttcccgttcttggactggagtaattcctaaggttagggccccggtggattcgccgaatatttgagtattgagagtccatggaaaagatatggaaaggatgtggatagccccgaaagaagcaacttttggaaagatttaagagagttatgaattgcagaagaggtgaatgaataatacaaatgtctccgtactcccgctactccatttgttctccatagtaaattaattaacccgatttcaggatcagatcccttaaatggattgtaaagccgatcggatatccgtgtcgtgtccgaagagggaagtagagtaccgagggttgagtatgcatatttgcacatgtacatatgcatctaatcgtatactacatactccgtacaacatacaacatacaagaataaagattaataagataacttctgataataaggggtgcaataaggctaaccttggaaccttcagatgtttggaaccgtaaaaatatcaattcaggggatctccaccaccatatccatggttcagagtgggacttattgtactagtaagatcttgaccaattccatggtttttcttctttttttggtttttcttttggtttttttcctggtctttttgatttttttggtcttttggtctttttctttttttgaatttcctttttgcaatttattttcccatgtggtccactctaaacgtgtggtgtatactccgtactccgtgtgcccccctgttcagctcttcctcatcttgtatacactattacacttgaaatgtttggattttaattattattctattttctgtttaattattttctggtttattatttttttgattactttttgctcctgaaggttcgccttgttatttttttttctttcttttcccccccacctctttgtttcctttgagtcgatgtggaaacgttcacctagatcggaggactactctgggaacgactcaactcaacatcatctatctgagctgggtttcctaggtcgatccagaaagtccaaaagtaagtgtgttctgtctctatgtctctcttctattcttctatcagagttgggatttcccagtcttggaaatgtcctagatctgagactattgtggcctgttctagatgcctatgggataaatcggactaaaaccaccctcccctgagtactagtattgtttggggtgtttttcttttttactctccctcttatccacatcctcaatccttttgtgcttctgcaaaatagcctcaatccgctattagtcttgaagagtccccaccttgctaaccaggttacctgtgacgtacagaatttcaattgcagccagaatcatcctctcgttcacctctccgttcatttcgttcactcagtcgaggcgtgatagaccgacctagcagcagtctttccaaccagaccgatattacccggagagcaccttcgactgtcgctggatcgattaattctgcctacccagaacccggtcaacttgcgcattcaaatcgctcacgcacatcatttcattcaagatcgggacggaccaccggcctaatggaggtagaccgcacccacacgcggagggagaggacctttgtcgggagcgaatgcgctgtctgtgaggaaccattggaacataccctacgcggcgagcgtgttctgcagctctcgtgtgcccatgtctcccacgaggcctgtttctatgaatttctacgggaatgcgatggacaatactgcccaacttgcaatgcgccattggccttggacacgagtcgcggcggaaatgtcttggatatcggtatgtctctcgtgcggggttcagaggggaggaccagaaggctaatatgattcaccagagaaaattagtaatattgttcgttcagtgacgtcgaatgataccgcaacggtacgcagtggcttgacaacacctactccatgggagccgtccagtcgacgagcaccgagtgaatccggcagtcgctacacctcgggtacccgggagccaccttacacgagggacgcatcttacaacccctcggcaaaggaaccaccctacaacccctcgagagattcatcctataatcgacgagatagccgtgataccagcagccagcgtgagcgcgtagagcgattgaccgtgggctctaaccctcgtcaaccccactcccggaacggcagcgcggccggctcatcgggcgaatacaatgaaggacaccacgccagtgggcggcgtcatgattacgatgtgcaagctatggagtcagacctcagtcctcgccccaaggtcgccaagaatcccattcctgcgccgatagtcactgtccgaagcgagtttccaactatgaatcgatctcgccaacagcagaccctcacgtgtctgattacggtcgaggtgcccgacgccaattggcgtcctgacttggatgacctacggcacacgccttccggacagtcgcagccggatgaggcatatgcaggacgatttggtggcggacaggatgctcgatcgatccagtatgagccaacggagaatatggaagaggtggccgaggaattgcgcaaccgagtggacaattggcacggtcttgagttccaacggttcggcaagctgcgcctccacggacacatgcgcgtgggcaaggatcgggattcctggcaggagttggaatgctatctcttcggcgagatgcttatttgtgtcaaggagaagaaatcgggtgactcccaatttgatgcaaccgggcgacgcaagcctgttcgttgcagtctgaagggctcgatattgattaagaagcatttaaagtccatcgaggtgtcgccagatgaacctattctctccttaaacctttctgtcactgagctgccctgtttctaccttcgcttccagaatcgcaaccagcttgaaatatggcgtcggtctttgatcgatttgcacccagaggccatttcacgccacaatgactatgactacgacaactcgggggcggaggaggatgactaccgcggtagccgtggaatccaacgacaagcttctatcaattcgtcttacggggcaggaaaatccatcaataccgccattacagactacaccaaccccgactacgccagccccgatgcagaattccctgccatcaacactgttcatatccccctcgatcttgtcgtggtcattccggtgtcctcgtctatgcaaggcttgaagattactctcctgcgcgatgccctcaaattcctcgtgcagaatctcggccctcgggaccggatgggcctcgtgacttttggctcgagtggtggaggggtgcccctggttggtatgaccaccaagtcctgggctggatggtccaagatcttggaatcgatccggccggttggccaaaagagtctccgcgcggacgtggttgaaggtgcaaatgtcgccatggatcttctgatgcagcgcaaattcaacaaccccgtctcgaccattcttctgatcagcgactcttctatctccgaccctgaaagcgttgatttcgtggtctcccgtgcggaagctgccaaggtcaccatccactcctttggacttgggttgacccacaaacccgataccatgatcgagttgtctactcgtaccaagggatcttattcgtatgtgaaggattggatgatgttgcgagaatgtgttgctggatgcctgggtgcgttgcagacaacctcccaccaaaacgtcaagttgaagctccgtctacctgaagggtcacccgccaagtttgtcaagattagcggcgctcttcacaccacaaagcgtgcaactggcaaagatgcggaagccgcactgggagatcttcggttcggcgacaagcgcgacgtcttggttcaacttgtcatccagcccgacaacgctacgcaggacaacatgccgcaggatccgtgggagagcctagtctccggattggaggctctcggcggctgttccgatggtgacgagggccgagtcttaagtgttgaagaggtcccattgatccaggctgatctaacctacggcgacctgctccgcgatggccatctcacccactccccccgcccttcactcctggccattaccatgttgcctcctaatcctcgggccaacggccagcgatcctcgacccctccaattcctcctcatccctcgatcgtgcagcgccggatggagctactcacttccgacatgctgacccgtgctctcacgctggtttctcggggccagcatgaccgcgcaatgcacctcctcaacgaaacccgcagcatcctcaaaggcctgggcaagggtggcctaccacctctgcccccgggtgcttccaagtctgacgatgccgatagccgcggcgacactcccgtctcggcctcctcccctaaatcgtctacctttggcggaacccattcatccgcatccgacaccaacaccatcacgccagcctccgcagtcgatgctcagacgatgattgccctgaacgctgatctggaatcgtccctggagtggatcaaccacccggcagtcttcgggcgtgattcacgcaaggcagtgctccagagcattggtgtgatctcctcacagcgcgcctacaccttccgcactccatccgaagctcactgggcccagcgtgtttctggtgtgcgtcggttgacggagcgatcccaagactggcgagagactggtgacgatgctttgactgaggagtagggtgtcgactctccgcaactcaacacatatttctcctccctcttatttttgacttctgaaacgttccccttgtgtcatattcccgactttctacatacatgtcgagtcgacattatttcccctgtgtttcttacccccctttgcgatttctctttgcgatttcttttgccatccctatgataccactttgttcccatgactatgcaacatgataccaggggctctattcttgatgtgtttccgttgtattggacataacatctctgtttctatgtaattgctctgacggtctcggctatggtgcgcgggtgggatggggttctgtcggttttctcctttaactgtttgaacatatgacgatttaccggacttctctttctttttctatacatccagccttgctagtttatctgaacctattacctagttgccttggattagtatataacctcatcgaaacgattctttggttccagcctcaatatctcaggtggatcaactcatgggcctaaatgtatgtgttgcgagagcaagagatctttaggtagtgagttgtgtctttgttgcctttctgggtcgattcgaataaggacgtaggatatcctcacaatagaggatcgaaggttggagacatcttatggatgacgttgatcccaggctacggaatgtggctgcttatcgtcgtgtggctcagttcggaccttcaacttgcaacttccccggggaggtttggttgagctagaccattgcaaaatccttgaatcctcttcctgacaacatctaatatagagctaaacaggctctcgaccatgctccgtcaatctatggcgcgcgcattccgcagcgcatgcgcataccagttcttatcgccgaagccctccacccacttcaaggccgcctcaccagcagctcaaacatcacgcttatccaataccctgggccctcgactctttacccgttgggctacctctctgcactctcaaatcgcacccctacgacaacgccgactccaatcacaactctcattccacacaccttccccgagcgaccggcgcactttcttctcaagccataaatctccttaccaacaaaggcagaaccaatacaaccgattccgagggagctcccgacaacctctcgtcttccgcttagtgcagaatgcaaaaccgcaccactttgttattattggcgtggggatatcgggactctatctatacaacacggagatagtggagatgaccggtcgacgacggttcaactgcgtctctcgtcaccaagagctcaacatgggcgaagagagttatcgcgaggttctcaatgccgagcgtggaaagatcctgccccataaccatcctcttactcgcatggttgatggtgtcctgcagcggttgatcccgcaagtggatatcgagggcgctgattggaaggttcatgttatcaaggacgatggaatggtcaatgcttttgtacttcctgggtacgttttactggatgtttgggttctatagttgtggatgtggctaacattgtcttgcttcgcttaggggaaaggtattcgtctacacgggtatcttgcccatttgcaaagacgaggatggcttggctgctgtgctgggacatgagattgctcacgtcgtggcccaccatcccgcagagcgtatgagcaacagtttcattaccctaggagctgtgttcgctatctctttcttgttcgatgtctccggacagttttcctctttccttttaaacctcatgtatagcttgccaaactcgcggacgcaagaggtatagttggttcttcgctttcattctacggccacttggctaatttctgtttacaggctgaagcagacaatatcggactaagtatgaacccttgaagttaggatcaacttgcgattgtgtcgctaacaattgtctccagtgatgatgtccaaagcctgtttcaaccctgaggccgccgtcaaactgtgagtcgacatgacatgtgttagcgtcttggactttgctgataatttctagatgggctcgcatgcatgaacaggagaaacaggcccctccacagttcatgtccactcacccaacggtaggcgtagaaaagttccatacgtggatgatagctaattcatagcagagttacaaccgaatggaagccattcaaggatggtatgaccatttcccctgcgttgacttattgactgttactaattcgaccacataggctccacaaggccgaagcaacctacgaggagaatgggtgcagctctgttaaaggatacagtaagagtttcttcctttgttcgatatactaagttgctaataatcctagtgcctggtttccgaactgcttataattcacaaatctcatatttgagatgatcaagcatccaagtcaatagtgcaattgatggtaactgcacatgtgtataatagcattagtcgatgtattaataaacatgagagaatctcccattacagacctcctgagacataaagtaaaatcatatcaaacatacaaagtatgaaggattataagattgtaaagttgctgatctatagcaagacgccaagcaactgggcaactggcgggctccccctcgtgcaaaccgagcaaacccaccaccgcagctccaaaaattgcccggcacaacagctccatccactccctcacattcaacccatttgatatccagtcgcatctccttcggacgcgacctaatatcatgtcgctatcaattccaggtccctcccaggcggggctcttcaagcccgggtaccagaggtgagttcgaaaagtcggggagccagaaagcccaccgcaatagggacctccctatctggcgcccctcaaaaagaagcaaagcaattggctgatctgtgtttcctaccatatagtcacgatgctgaagatggagccgttatccgtaacatcgaagcctgccaggctatctcaggaaccgtccagacctccctgggcccctatggccgcaacaagatcgtcatcaaccacctgcaaaagatgattctgacctccgatgcggccactattcttcgtgagttggatgttgttcaccccgctgctaagctacttgttatggcgagtcagcagcaggatgcggagatgggcgatggtaccaacttggttattgtgttggccggggagttgttgaaaaaggcagaggagttgatccgtatgggcctcaagacgagtgatattgtttctggatacgagaaggctcagaactatgcctcgaaggttctagagggtatgtttcccaaccgcccccccccccccccccnnnnnnnnnnnnnnnnnnnnnnnnnnnnnnnnnnnnnnnnnnnnnnnnnnnnnnnnnnnnnnnnnnnnnnnnnnnnnnnnnnnnnnnnnnnnnnnnnnnncccccctctctctctctctctccttccattatgctttgtggatatacaagtatacaagtgggggaatgtttctgactttatctagaccttgaggtcgacagactccaggaaatacgatcggcaacagatttgagcaaggctctccgcacagtggtggcttctaagcagtccggtacggaagatgctttggctgcgttggttgcggaggctgttctggctgtgttgcccaggaaccccgctaacttcaacgtcgacaacgtgcgagttgttaagatcatgggtggtagcttggaacagtcaaaggtggtgaagggtatggtcttcccccgggagcccgatggaactatcaagaaggccaccaaggccaaggtcggcgttttcagctgccccatcgatatcagccagaccgagaccaagggcacagttctcctgaagaatgcccaggagatgatggacttcacctcgggtgaggaggatcgtctggagattgctattaaggagctttacgattccggcctccgcgtggtcgttgccggttccactgttggcgacttggccatgcactacctcaaccgtttcaatatcctggtcattaagattctgtccaagttcgagctccgccgcctgtgccgcgttgtcggcgccacacctctggctcgtctgggcgcccccatgcccgatgagatgggccagatcgatgttgtcgagacgaccgagattggcggtgaccgagtgaccgtcttccgccaggaggatgttaacgccatcacccgcacagcaaccattgtcttgcgcggtgccacccagaaccacttggaggacgtcgagcgtgccatcgacgacggcgtcaacgtcgtcaaggccatcaccaaggacccccgtctcgtgcccggtgccggtgcaacggagatcgagctcgtcgagcgcatctccaacttcgccgaccgaacccccggtctgccccagtacgccatccgcaagttcgccgaggccttcgaggtcgttccccgcacactcgccgagtctgctggtcttgatgccaccgaggttctctcgcgtctgtacaccgcacaccaccgcgccagtgctcctggcgagtcatcttccgaggaggatgaggaggagggctcgtctgaagaggaggaaccctactggactacgggtgtggaccttgagattggcgactccgatggcactctggacactgtcgaggagggtattctagatcttatggctacgaagatgtctgcgatccgtctggccagtgaggctgcccggacggtgctgagcgtcgaccaaatcattgtctcgagacaggcaggaggacccaagcctccgcagggtggaggtgattgggaccaggactaaattttctttaaaaaaaggagcgatgagggtctggatgctgtttgataatatgaggcctatagatcttcgtacgatgatacgctttttgagaaccactgtaaattggactacctttctcttccagtactttttctttgctttcttcatagatactctctacagatatcttatacaatgaaaaggatatcagaattgagttgatcatacctttaactaactatagttagtgctacggcggtgtttgcctgatagttagttagataaacatatttgcctgaggcacaacaaatgatcacgtgccactcccagattttcctcgagtgtttcctttcggtcttgatatcaacgagccgcgattccaatccccaccactttcctctgattttcctttctctcgggcttctctcgttatcacctccgccatgtccttctccacccaggccgcagcccgctgcgccagacagctctccggctccgtccgcccgtcctccctgcgcatcgcgacctccgctacatacctcacagcccgtggcacacctagcagccggcgatgcgaatccaccgaggcagcccctgctgctaccaccaaccccaagatttcccaaattgtcgaccagatcagcacattgacgctgctcgagactgccgacctggtgtctagcttgaaggtgggtttgacaatctacacatattcaatggatttccaaacagaacatgcggacattccatatatgcgtctatctacatcgtcactctactcaattgaagtatttatccgaaccattgctaatcaaaacgcctgcacagacccgcctgaacatccccgaccttcccgttggcggcttcgccatggctgctggtggtggccccggtgcggccgctcctgctgccgaggaggaggaggctgctcccgctgctgccgagaagacactgttcaacctgaagctcgagtcgttcgagcctacctccaagcccaaggtcatcaaggagatcaagaccatgctcggcctgtcgctggtggacagcaagaagttcgtcgaggccgtgcccaaggtcctgaaggagtctgtgcctaaggaagaggcggagaagctcattgagacgttcaaggcgctcggtgccaaggcgactatggagtaaaagctgtgttattatttaggtacggggagggggtagattgagaagagagtcgggggaagatgttgtccatttggtcttttcctctgttcttcttctctttgattcttgcttttgagagatcttgttgagcatttattgtgtttggcctggcagatcaaggcaaaatgtacattatacgcattgtgttctgggaccgtctggtacagagggctcatttggttaattgatgcatttagcatatcaatgctattctatcgcttttaaaataagtaaatatcttctttaaatactacattgccgtatagtaaagttggtagatctaaatgtcaactgttcggagtagcttcgcggtgaagttcccgatccccagagcttcggagaaaaaaaacttccccctcacccaaccaacccccacgatctgcctctgcgctcttttcaatggccagaccattgattttcccattacgatggcgtcaattacatcaagctctctgtccaaaagcccacgcgttgcgccacaacggcctgcaagcttgcaccgctcgagctgtcaccaatagcaacccaaccgcatcgaaacgacccttccacactactcaatcacggtcagctattaggccttctcgccgatcaccatctgttcgaaaacaagagaggggggcgggagcggtacccgaggatgtgttagaaggcccaaatggattgacgctagaccgtgacgggttttggaaccattattgtgttgcgcatgttgaaccaacattggctgagtttaagaaatccacgcgtcacctttatgagacttacggcttcgtcttaccgccggatgttaacatcgcgacgtttgggtctgtaggtgaacagttaatcaggctgtcgcactcgcggtacccttccgcaagtcttatacggagtatctcaataggtgagtttcaatttcaattgagtgtatagcggaaggctatggattgggtgatttagactaactctgcacttcattatagatgtcgacgctgtttatcgaatcgcgttcgctctgagacccctttccaaaggccgctacatctacgaatgggcgttgaccggctgcgcaaaagcacattcgcgccgagcccttgtggatttggtgaaccagtacatcagcctcgaaggcgtggatatttaccgaaacaccgagcccatggtgcagatcaaagacttggctctcaaagatgaattccctcaagcgatcatgctatatgccaaactgctcatctggcgtggcgagaacggacaagccgcccggctcctagagcagaagattctgccatacctgcaacccgttagcaaacgccctcccctttgggaggatatacggttagtggacgacttcgaatcgccctggcggatgtacgctattgctattgagaaggaacagggtctacagggcatcctgaatgccacgcgacgcgccgccttggagttctacgacccgcttgccatgactgactatgccatctccgtgttggaaacggatgaacctcacagatacgaggtgtacgaatcgtacatggccgccgctgcattggggcaacagcctctagcctgcttttaccttgccaatttctattaccgcatctcccaaggcgaatttacaaccgaagcagagagagacgccaagaagagggaggaggcctatgccgcgcgccacgcctggttgagacgtttcgaacccatagaaaagtgggttaatgatttgttcaaccaacccctcgaccgcaagtcataccgcatgatggcgatggattggtacgagcttgcctttgatatgggaaacaatgaggctgggtatattctagccttgctccttcgcgaggatggcgagatggagaaaagccgtgaggtgtacaaccttactgctcgaaggggtctccctacctcgttaccggagaaagggctgaaagaaatggaggataagtgggaagaccagacctgcaaccctggtctgcctcctcagctcttgaggcttgcgtaggtgctttagagccgttgtgtttatacctttaatatgtatgctgtacatttttgtccttgtatcccaatatggtatcattgcaatgtttctttctggcgccttttttcggccttgatacctttttcttctatctatcccccgctcccaagcatgcatgtctcatctcgcctatcccatgtaaaaccgacagaagagaaaagcaaaagttcagaactgtcgttatgattgaagaaaagaatcaaacgccgtgtttcatccccgagtccaattttccttttcctcgtgccaaacccgagacaaagccattcacagactccagactgacaacccatatattcgaaggatgataatatcaacacagcagaagaagacaaaaggaagaccccccccccaaaattgacaagagccaccactcacaaatcaaaatcaccgcctcttcttccccttccccttcccatgacccctcgtcttcaactccacaaacccaagttccttcaaaccctccgcaagaatcgacgaatccctcatcccggggaaatccttcgcaggatacacccggaacggatcagaccacgcctgcgcaagaatcggcatcgactgtcccgtatcctccacagagccccaattcatcaatcgaaactgcagcctgtataggcccgccgagcggatcgagagatccgcgaagatgaaaaaggtggctggttggtggaggcgcgaagcggcgtggttgtaaacgtggtgaggggggttggagatatgaggatcggatatggaggatgggtgtgcgggagcggagttggggtctgggtcggcgtcgacgtagaagggggacataaaggctttgcccgatagtaatggggttgagaagttgtcgtctgtgcgggcgacgccgtctgtttctctttctctttctcgttctctttcgtgttctcgttctcgttctctatcgcggtttccgtcccggtcttgatctcgctcctgatcgcgctcgcgtgaatgtgcttctgttggttcggcatatggcaaagaaggtgagacggggaatagtagacagcctactgtgaagcgggggtcttggaggagatcccggtcttcttgtgagttggagtcgaagtcggtcaggaggatctgcacgattgggggtgggtcaactgggcggcggtctctgtcgcctgcgccgcaggctcgtgcggcgatgggttgctgtcggatgtggagatggtatcgggattgggtggatggtcgtctgggtggtggagggggtgatggtgattgtggctccggttcagggtggaggagcttgtcgaagccgtgtggcattctgtagttcgcgtttcgggactgtggtttcgggtcttggtgaatgctgggtagtataggattgaatgcgtgggtggctgcgcttttatctgaccagacggggctgggcatggccgtagaactgctgctgtgtctatataaaagtccgttgtcagaatgtggttcttgttagaatgtctcctctgcattgtgtaacctgtcacagatgtgacatgagacggaggattgtgttcgaattctccaagccgaagacatcgcatcaggacggagcactgacagatagaggcggttcaatcgacagaaacgaaaagagagggactttactgggactccacgtcgtatgtccagctccggtgactctcatagtcacgagcatggcccgaagttgggtacgttctctcatcgtacgggttgtagtaaccgcgggcatcagagcttcccggatattggtgatagggtcggagagggagcgtttggggcgtagattgtgtgttcatgtaggcattgtcggacgaaagcatatatcggggatctgtgcttctttcaggaacaaccaaggcaggtagccttggaccaagaggtgccccgtgcatagggcgcccatagctcgtgctctggggtatgatctgtcgaggctcatgtgggtaaggatatggcatgggtgtcgggccgcggtgttgtgtgcggggacctgagtcgatgtatggccgttcaggtgtggaattcccacattgctgtggcggtggcctcgccatatattgtttgggggacttgcgcaagtcccaataggtggtccttgtgttataatttagatattgccgtattggggttggtttcagacgaggtaggttgcagacgaggcattgaatgaaacgcacaaagcggtcagataatcacgatcagaacagagtcaatgtcccagatagaattatatgtcttgatgggaaagagaaaaacatatccggtcaatgaaggcatctgatgctccacatgtaaacgcaggcggttaacagcgacgcctcatgacactagctcggtatgatcttttcttcttcttcttcttctttttttttttttcgccctgtcgaattggctctatacttccctcggggggattcgttggccgattttccttagggatcggaaaaaaaaaagaaaaaaaaaagaaacgtccacagtaaattttaatcacccctgtccagtttccccgagctatccaaccatgtgatggctggaatatgacaggggagtgggaatggtgaaggtcacagtattgaataatgtccttgtcttagtcgaaacacttcgataccctacgattggcgtatccaccggtaatgagaaagggaagagccgggggaacggggaacgggccgagtgggttttgccacgagaaggggagaccagaactacacaagtgggcgtggacatgggtgtgtgggctgtgcctccatggaaatggtgcgtgagctgaatgaaggcagaaaatggtctccgatctctcgaaagacggtcaggcaatcgaatataagtggaagctgttttgtattgtggaactcgcatgtacaaccgggaagcttttcttgggaagggtgctcttgaagtatctcgtgttggcgtacggagtgcagccccggtctcgacccatcggcatagtgcgaacggggcaagaaaaaatggacaaagaccttgtcgaattgtggctttttgcggaccggtctacggggttgtgggccgcacacgaccagaggggttatgtgttttggctttcagaatgtgtgaacagcactccgtacgaagtgtgcggattgtacggtgtaactggcgttttagcgaaaaactcagatgtccgctttgtagagtacagtacagcaaatttgccgattgctgaccgacaagcctccggcgagctgggaaccgactcttcaaatcccaagtgactggatctggaagctgccgtgaggcgtggtgattggcgttcaaaccgttgcttggcaatccttcagaaaaggatctgccttcccccccaacaatggggaatttggaagtgttcactggaactcaccgtcgtggtgggatgatcttggtagggacacgaggtagtcctagggcaatatagtttcgagggtggcaaggagtaagcctttcggagggaaaccgtataacctggcaagttcatcagctttcctgagattcagagtcaattgacattccaggacgctcttaccattgcaacccctgctcgtgggtctctgagtggactttgacagcaattccaattagaaatggccaatggtatcttgccgttcgatcgatcggcgtgcaattttagcgaagacgaacgaactagtactaagattagacgggttcagattggtccaagcgcttgagacaattttattgtcggatccgagaagtgtgcctcttgtcatatgtggcacgttgctaatgctggggtgctgggggccatttttgaagattttgcagcccaatgctggaaggccaacgtggattggaagtccttgagttgcagatgcaggtcgagtttcgtcaagggtatttgagttctaaccttgtcggcagttctagggactcgcgtcgactttggactagacctcactccagttcttggtgcatgagaatcgaatgtcttatgacgtacggagtactccgtactccgtaggactgaaaacccatgcaagtcaaagtttttgggtatgcaaccccacgtagcagtgtggctgcgttgcctcttcgttgtagttccctagaagacgcccgctgcgtgctgcaggagtgcaagaatcggggtctccatatgtccatcaccacaaactggccggaataggaagagatattcggaaaaacataccactcatagccgggaatatccaagactacgaggggcttcgataccaataccaaatgggtggcgtccccccatccttaccgacggtcttgatattgcacatggcgtgggaggcttggctccatatttgtgtggaagacgcatctcagtgcgtgtcactggtagactgataacatttccgcggacacccaagacaggccaagttgggattcggaatcctagtcagctgccgatcaaaactgttgattggcagtaggttcatgagctgggttcactggattttagatgaaagagcaaaatataaagctttcgttatatgggagtcatattggagatggaagagtagccgaaaaggatatgcctacaaagcaacacatctagattctgccaaagcatatcaccgctcagtcatatcaatagtccatgattcatctcattccagcaacttaatgattttatggatatttcgcacgggagaaaactcaatactctaaatctgcacttggatctacatccagatagtaaggacccgagcaattccgagcgtgaaggcgaccaagtattcgctcgctacgattgcctgggagttcgagatgcatcaaggcaccaaaagggccatctgagggtgctggtccacagtcaatgaccccgttgctctgcccaacataaagcccgaggagttccccgtaatgacggtcccaaaccacgatgtagcctgacggttgccatggttcgtctggaccatgccgcatatccatgcagccaagttgcatcaaatgtaagttgtcgatccccatctgaggaactccgtgaatgatgaaacgagcccgaataaggcctagggtagatggggtcataggctcagacaaatcacgcagcgccggaatttgggagttagaaaattcaatcggtgattgttctggtacccatcggagctcgagggattcaagcttggaacgaacttcatcaagctgtgctacattgcaatcaagacgagtgatgatcgtttggggctgtccgccgtggtcattcaacagatctgcgaccctgcccagtgcagccggagacttggagcagccatgagccataagttctgcatacaactgtcctccatggttggagtcaacggatttgttatctattttcggtaaaagttgatcatcaaatgcttcccagattgattctgaggggtccaaggccgtactgaaatgcctttggctttcagggctccattgaacatccgtccttcgatccatgtcctcaaggcaaacctcaagtagttcaagatagtcttctcccctcactaggtcaggcagtgcctcgcccacaatagggtcactaaggaggaatccaacattggaaaacttcgcaatgaatggcaggttatcaccacaatgttgagagatatcttccaaccatttcactcctatttcggactgaacatttcggactagagacagcactacctcataggcagcaatgcagctttgagagtttttaggctgaatgttcttcaagaaatgagaccaacatgtgtgaagtatctcatcactcccaagcctagcaagtagacagatataatactgggcttcgttttcataattgaatcggtcgccaatttgatcagtaggttgcgtccagaacaaggtatcatgcaacctgtgtttttgtgccacgagtcctccttcacctgtgatctcagcaaggatgggattgggatcataggaggggtcctcaaaagccttgcagtcgagtgcttctgaacaaattcggattatctgcagacttgttcggagatttagggctcgaatgcccatgtggtgatggttatacaagaagtgcctcaaatctgaaggcgaaagagcataaaatgcaaagtacagcgctatagcgtacatcctgggatgaacaggaagctggagacgtttcagccttgcaaacaggtcatgcatcaccgtcaggatctctgctaatgtgttgttccgttgacagcgtcgcaaaacgtcacgtaattgggagcaattacgagactgcaatatctctgctccatgtctgtcgttgacgtatctctcaattagactccgtaaggaagcgacatcggccatttcgctactgggatcccacaacaactctcggttccgcgatgtaagccatttgagggaggtccacaacggcggaggtggagtgttgaacttccactcggtagcaaattgtccatggaggtatccagataagacctcgttagtattcgagtcatgaattggctcagttgaatccgtcagggcgaaccgaagcagttcagatggtgatgggtcacggggtcgtttaatggttgcgggatggaggctgcgcaccaattgccgcgagagagtattcccagtgctaagctgtagtcttggttgcagcagcagcaaccgagtaggcggtcctcccatgtcgactggattgaagctgatctccaggagaagatgtggagaagataaaggtccgataaggactgtacccaagtctggggtcttgcccagcagatcaagggcggcgtggaaggcggtgtgggggccgcattcgcgcttttatttcgtcaaccagctaactgccattccttatcaacctagctacgaacgaaacacttaccgatttctatccatagctgctgttgatctattgatcaacccaagggaattatggttcgaaccaggaatgcggataaatccgcgaaggacgaggcgagccaagaacagcccattgaccaaccgactgagaacacgagcgaatcgcctgtcgcatcttccgaaaagaaagtcgaaactcaaccagatgacacaaaggatgacggtgcatcaaaagcgcgtgagagaatgaataggttcaaagccttgcaggctcgagctgtatgtcgtcctcaaaaatggcttgcgcggatcaataggcttggccagcccaacccctccacataactgaataactgacacaacatatagaaatctgcaacggagcgcaacttaaaagagactgcagccgagtcccaacgtctgactaccgacccagccctgctaaatacgttgtcccgcaagcatgcattcgcctcccacaacctcctcaaagcggatacggaagccgcaggagaagattttgaacgcaagcgggcatgggactggacagtggatgaatcggagaagtgggatagacgcatggagaagaagcagcgtcaccgagataacgtggctttccaggactacactcaagatgcccggaagatttacaagagacagttgagagagatggcgccgaatctggagtcctacgagaaagaaaagcttgctgcgatcgagagagccgcagccaacggcgatctagagattgtggagaccgaggacggtgaaatgattgcaattgataagaacggtagcttctattccactgcggactcgactggctttacggagagcaaaccagatcgggctgctgttgacagactggtcaacgatatccagaaggcagaggaggtgcgcctgaagaaacgcaaggagcgccgtggtggtgatgatgacgcggatgtgacatacatcaacgagaagaacaggcagttcaaccagaaactcgctcgtttctacaacaaggtcagttttccgctgctgtctttatgtgatccttttactaacactttttattagtacaccaccgaaattcgggacagcttcgaacgtggcaccatgatttaagctgaatgtgaaattcattgcaatattttacattagtggacgttccgagctatacagctgtgcctgaataggcaccaatcaaccagcagagattccacgcgctttcccctctgcccaaaaaaatttgttttacaaacatacaggtcacttgatcagccaacagacctaaagcatcgtctttcgccaggcttttgttgcaagtgcctcaatctgttttgttccgactgcacccttggtggactcatcctccaatgcctcgacaaccgcttcgcccacaacatcggctttgaggggcttttcggccatagttccgaggaacccaagcttattcccgaggaaggtattgaactctgaggcaacaaaaccacccattgcaattggcagcgtgaacttccgactcgagtcgtacatgaagcccgggcgtatgaagatgctccgtaggtccgggagggtggatgtgatagttgcctccgcttctcttttagtactgatgtacctggccggcagaatcggtgccccggccgctgcagatatgtaaacgaaggtcgggacatgctcattggtggactcctgggctagtgcaattgctaaatcacacatgtgtcagctttcaaaacagactttagaactcttgtccgcacctgaatctcggttcatcagctcataggtcagctgcccatctttctcttttggctccaaagcctcgccctcttgtcttgttagagggttttggcttccaagcttagatgtactaaaagctcgttgaaggccactgagaattggttctctcccttgcacaacgcccttgtagtcggcttctaatagaatgcccattgagtggacaacagcagaggcgccatgtaaatgtggcttgtagctctctggtttgagaatatcggccttggcccattccacggagcctgcccagctaggccgttcacgagaatcagtgactgcctcccaccggggctcaccagatcgactagacaaagatcagtttgtgctcttccatagatccatacataggcgagaaagctaaccgaccttaatgatgtgactgtccatccccttgctgttgcagctttacagattctggatcctggaatagctagtcagtaaatgatattgatatttctgcactgaatgcaaatcacaaacccaaaaagccgcttcctcctgcgacaactagtcttttggtcggcatgctgtagctttgggatagctccggagaatgatatcactaaggaatcggaacaatagtccgggctatttaggttcacaattgagattctagagctgagttgaggaagtgaatatcatgctcttcaataagcgaaatagttcaattgttcaaggtaattgtctcttcaccaggacttttgaagttagcgttcggcatcattcgccttcttgtcgggccacttgagccccgacggattatccttcttccgtttcgcccttgctctggacaatccgtgttcatcggttctacaatctaacatcaacgtgcaagatggtatctgcaacaggaaacaagcgtgtcagggtaagtttcatgccccgggaaatactaaacatgaactaacacgctcgcagggcgtctcagccttccgaccatttggtatgttccgcaaagagcgcattatcgccaaccgccgcaagctaataaacacagtatttggcagtgtagcgacccccttcgatcccaataataagccctcagactgtcctccagaccacacccacagttggacgatattcgtcaagggagtcaacggcgaggacatttcctactggctaaagaaagtccaattcaagctgcatgagacatacgcccaaaatgtccgcgtggtcgagcagcagcccttcgaagtcacagaaactggctggggtgaatttgaaatccagatcaagctgtactttgtgcctgagtcgaatgagaagccgcagaccctgtggcacagcctgaagctacacccttacggccctgatgcggagggaatgaaagagcgtcgggaggatgtaatcagccagaactacgaagagatcatcttcaacgagcccgttgagccgttctacgagatcctcactggaggcttcgctggtggtcaggctggcaagagcaagggaaagaataccaagcagattgggcagaggacggcggatattccgatgagcgatacgcccgggaacccatacagtcggacgaccgagaggaaagagcttgatcgcatggccgaagccactcaagcagttgagcagatgatcaaggaagagaaggagcgtttgatcgagagggagaagtatctggccgagctgcgagagagtgagggtgtgcccgccaacacgaagaagcggtgatcgttccagacgctcttctaagccgagaacctaggccattgctgcagtgtgataggcttttgagcaccccgtcaggatgtgcctgaccaacaagcatcatcacccttgtccaaacgctcctcagtgctgggaccctcctgagaggctctactgccccccggcagtcgaagtttatgtcattacacctctgtgaatcgccttgccacaagatccagcctctctgtttccaccgagttcaccacgatgattgcattatgccagatacgaccaacaggcccgaatatctgcgtcatcgcaggtttgtgcctgggactcgcatggggccctttcctcgttatctgccagatgggggcggcgatcttgggaagcaccagggattctatccaaaccatattcataccaagtttgcaacaagattgactccggaatctgccacttacatggggaaggggaaaccctacgaggatacggtcatatcgccgtggatgtacctccggatctcgggatgtatcctactctagatcgtgatgcgattctttgtttaggaaggccatattgaaccatagtactggtggcaaccaatgtcaatttacaatacggaaagacaaatctatatcacaatatgttcgttcaatcatcgcacgtccatctgaacacctagcacttagcatcttgaactgtgtctctggtctttttcaggaagggtattaaatccgtgccaccagtcccagcaagcttagtcttcgtgcctgcttccttcgcgtgagagctagccgtggctagattcattctaccttttccttgttcagttggattaggctgtctcgatgccatgacaatgtatcgagtgaccatctggatgtgtgtatcgcgaaaagccttcagctcgttcacagctgcgttatacgcatccttaggctgttgaaccggcgactccagtataaacggacgaacactagctcgagcggatagttcctcaaggaagcgcctatgcggaccaggcatatagtctcgcatttgctgtcgttggtgttaatacttggtgaaacatgtctgagacagaggcactggaaactggtatcccgtgatgttcttacctgaataaaactcggaccaccagtctgcttcccatccgtcgcagagtgcttaataccaaagaaaatatcaagtgcttggatcagcgagctctgtgcattacttccaccatttaactggagccaattctctggtctttccaccctatcactatcaccaatgtcatagtacacacccctgggcagaccagcatgacccatattcttgctgccagccaggaacggccgaagctggtggaagaagacagccggattgttgtgctcgtacattctttttagagtcaatgtcaggtcgcataaaccatcggcaaacctgtacaagaaggcagtgagaaggtctatatcattggcagcaactgccttagaagcgtccctcatcagcgagatgagtttgatgcccttggcttcaacggcgacggagattaccatgaaccattcctcgtccttcgtgccggtgaacgaggtctgaacatggagattgtccgggtctgtgatgtctgcttctgggtgggaaggtatgaagttccataatgtgaggccggcgtaagtggcgcaggcgggaagttcgaggtgtgctgatatttcaaggaagggttttgagattgaggggggaagcctctgttgtctggatgttaatgggatttctttgtttgaacggaaaggaaccttggaaagggccccggggcccggggtgatgggcgcttacgtcttttggggtctctcctccccagatataggcatgagtgaaatatcccataataacacatgctcgtcgccattctggttctgtttgaagattctcagtcgtgcatacgggcatattgtcgattctctcgcggatttggtttgtttggatgaggttcgggagttggctggctatatcctcccaaatctcgtaataagggtttgagattctggccagcggaaggccatctgggaggaagccctgctcagcataaccttcgaagagatcattgagaacagcatctgttgattgcaacattgtggattaattggtgtaggaggttcccggtcgagagggagaacacggcagacgtggtataaacaaagacaaaggggaacgactgccttttatgtttatagtgcgaggtatagtcttagtactaggatggtctcaatattgaaatatcttcctgcatcggcttgcctcggggtcatttactcaaaatacctatacagtccggaagctatccggatctatatccgtcttccgcctcttgatgcgatacatcaaccgtctcttcgttctacccactttgttcagcgagggatatagaaaagggtttgagacatagatcaagtctcctgtcaaataagtatacccaaaacaggaaataactcctttttgagtttgaggatgtgatcaaggcctcgaagactcggggatggtagccaatccaacaaagaatgttgggttctttgcttagctgacctgcataggaggcaaaccacctgcaaatattgatgcattatgatgcatgtaatgcatagtccatagtcaatagcctacctattatacctattctgctatttagtagaatccatggatggtcagtaaattaagtctaatatgatgtaacgataggcttacctaggtatacggatgtctacatatgtagttatgtggtgagaagacggatcggggaagacggaagcggaacaacatccgggttgacgacgacaagttgcagctgtgtctccctcgtctccgattcggcaatgggggaattataaaaatcaatagcatttccgttttttctcgttcccctcattcatggttataactcaaattctcctgtgacttgctacactctatattccatttatattccatttccacagcatttatagatatgacgggtaccaaagcttctaagccagtcttccctgcagaggcagcatcacaagattatgccgcctctctggatgcagcggatcctctgcgtgaattccgcgaccaatttattatcccctccaaggctaacctcgccacaaagaagttggcaaagccaggtgagaaactatatcccagcggggaacaccaaatatagtttgattattgctaacaacgttatgtaggtctctcgtcagagccaagcacgtacttttgcggtaactcattgggcatccagcccaaggccgtgtcaaagtacatggaggctcagttggatacttggtcgtccatcggtgtctgtggacacttcaccgatcttgaagattcaccattgaaacaatggcagctactgtctgaacaggccgctgcttcaatgtcccgcattgttggggccgcgcctgaggaggtcgcagccatgggaacgttgactatgaatctccacctgttgcttgcaagcttctacaagccgacggagaccaagcggaagattctcatggattggaaggcattccccagtgatcatgtgagtgacaaactacaatgagaatggtcctctcagggctaatattgtgataacccgctgtacaaattacccatcactaacatgctcatagtatgcaatcgaatcacacattgcctggcacgacctagattcaaaggagaatatgattctcattggcccagatgagggacaatacgaaatctcaacagagaaaatcctgtcctatatcgacgagcatgctgaaactgcagcgctgcttcttctgcccggtatccaatactacaccggacagctatttgacatccccacaatcaccaagtatgcccaatcaaagaatctcgttgttggatgggatttggcacacgcatatggaaatgtggagctgaagatgcacgactggaacgtcgactttgcagcttggtgcacgtacaagtacggcaatgccgggcccggcgcaatgggtggtcttttcgtgcacgagagacatggtcaagttgactatagcgccggaccagatgctccccagttccgtcaccgcttgacaggatggtatggtggtgatcggtcggtgagatttaagatggacaacagttagtttcttcctatttgtctctcgcaatgcgtcttctagcatatgctgaccaaatcaacagagttcaagcctattcctggagctggaggcttccaggtctccaacccctcagtcattgatctgacctgtctttgtgcggctttgtcagtcttcgatcagacctccatggccgacttgcgccaaaagtcactgaagttgacggcgtacctggagttcctgcttctgaaggataccgacgagaagactcgtctgtatgatattatcactccatcagatcccaatgcccgcggtgctcaactgagtgttttgctcaagcctggcttgctgcacaaggtatccgaacgcctacagaatgcgggtatcatctgtgacaagcgggagccgggcgttgtccgtgtggcgccagtgccgttgtacaacacattctctgaagtgttcaactttgtcagtgaattcaaggccgctctggcctctgagtagttggtaaatgattttatgacgaatgtggataaatgtcgagtatgataacgcaatgcacactataaatagtacgccctggaccttccgtaactattccacctcaaaattgaagaccagatagatctacatgacagttgaagcctgctggtgcaagcccttagaaattcccaacactttcccagttatcaccactgcgcaagaactcttgcccctgagaaaagaaattggtagcaagaatagagaactcatcattagacattgtcaaatgttgcggcgagagcaaagagcttgctgggtagtcctggctaggaaaggcggtattggcactgtacgattgagaccgaagatttggtgtatcttgttcctggacagtcaaccggaacggcggaggcaaaggagacgtctgagatacctctgcgcctgcagaagacgaaccggcatatatcgactctccgaatagtcgccgagcagagtctgtatcgctgttggaggagtattcgaggatttcccagaatcgggacaggtcgattaggaggctttggttttgcgcgcctgggtctgactggtaggttgcggagactgcgtcttctagtctctgcaatctatgagcctgttgataccgaatgaagtgttagattgttgatttaaccccacaggcaatccgaggagatgggggtccataccagtcgagccatgtgcggccacctttctcctatgccttgcacaaacttgacacacttggcgaatctttcgcgcttatgttctctgatagtcaaatcatccgtgaagctgagttgcagctcgattgtagcgacaacggcggcgctgtaacctagtagcggatctgatactagaaaagccttttcctcaaagcagttgataaagtggatgatccaggttgtatgcgaggagatcaggtccgaggtgtgctgtaaaaagatctctgggatagtactgcggaaattccgaagactgagcgagagaagcagcggatgattgagtagacacaggctggtatgatacatgaattgattcagaaaccacgggccccagtattcacgatgtgcctgcaattcctcgagagagcgttcaccgaggttggctggcttgaaccgatgaagatacggcatgcgagtctcgaggtccatttgtaaagcaagaattttcgagtattcggaatgaggagaccatggtgggacattgcttgggcgtccgtgaaggcgcacgtatcgcgccgtccttgcgaacacttcgctcagcattaccacataagcaatgattccttcgtcttgcatgtcacttcgccggatttcgacggttgatggccccggagagagaaagcgtgctggtcgtgctgggctttggggatatggagggcctccggcttggggtatgtccaggattggaaagtcgccgccatgtagtcgtttgagaagacatatactccagaagcagcgtctgcgttcttcgcggactatagtgctggttgatgagcggggctcttgtccgagattggcacattgtgcaaggttcattgccaagctgctgtggatgctggacctatgtgtattaccgtctggtagatattgttagctcgagtctagatgttggaaagatgttggaaacgctgggtccgtactggtgaaatcaaccaagctcaaaatacagagactttgaagggtcgaaagctccactggcccttctgagactcttttcataacgaggccccgagcaacctcagcatagccatttatcaggctagtggaatcggccctgctatggtaaccgtatgagaaacgaaatgcgagtgccaatatagcaaaaaggagctctgtttcacgtgtttgtagactggagagaaagctatccctgtagaaaagaggcaaaggctgagagtcacagtatagcagatatagctctgcaacgggaataatctcctcccacggtggcaggggagtagatgaactcggcattgacaatgccacagatggaacaagagactcggtgggtatttgcggctcactcctcgcgctgcagcatgtttctaagagtaagtgattgctcaaatagggatcatgtacgggttcttacccaagtacatccagaacctttcccactttgctttcaaggcttcgcaacctatcttcctgtggtgggatcagtttccgaagaaggactcttcgagcttgcattgagagtgaaagatacttaccagaacatgggatgtcccagggtctgaatcgctgagccttggattcaactcgggaagtggccgacgcctttcatcagcgtatagacattgttgccgtagcctggcacacagagaacagaccggctgctctcccgggcatttagcttttttacgcctgaggagttggttaatggctatctctttgtacaatccgatcggcataatacctgcaaggctcacaagcctgacgaacccgcttggcgggtctctctgaatagttgaagctctcgtcttccattgttatattcgtaatattcaatgctctcaatgaacacagtcatcataggagtatgaatttgtatttttggaccccaattgacagattatattgagataggggtatacgtagtgcatgcccttgcttcaagggatacacagattggaacgagcaaagccgttgtacattttggcgtagagacggaagtaaagccgtgaaattggccagtggaccgggtccgatatgaaatggctgagtaatcacttgtgaagtccacgggtccaccgaccgggcgttggactcatgaacgcagcccgcggggcgcctggaccccgagccttaggattctgttccgcgatgcccatagacctcttgggcacgttcacgtcaagcctcgtccatcattggctctccttgccgtcagttgtttccatatatctctgaacggattttattgaataccctgtgttcctaggcatgtgagatacatacatgtatgtatcttttagtctcatcttgaaattctatgacctcaattcccaagaccgatacagttatacgagctctagatgtgcaaatgaaggcactcatttgaaactgaaactacgaaccttcccgaagctgtgctgagtgtcgtgactgctatatctgagcctttcgtagttcctcaagcttgtcataagagtatcaaacaatcggacgtacgcactacatatatggctacgacagacggtataatacaaggttctttggaagaggatcgtccgtctcctgtaagtgcctccttggaatagcccaggcaagtcatgagtcacccatgtcgaccttcgccatatacctatctccccactgccgtgtacaggtataggcggagaatactgtgcttaatgtgtggacagttattaccgccacttggatgtctagcaggactgataaaggccaagatagctcggcttccacttgttgcgggtcatagcacaaccatctccattctatcaaaaacagtaccacccaacttggggcgaggggtctgaacgactcccgttccgtgacatcagggaaacgatatatggcagcatctcttggattggcgctttaattgatcatatgtacagctccaaatctgcgtggctgccaacccatctaacccctccctggagtagaagtacaccatacaaaaaaacaactgatgcctcagctgaataaccaacggaactggaaatggcatcatttatcattgccagactaagccttgagacctacaatttagatccaagtcttgtggccctgtaaggaaatcagcatttgaacgtatcaaatcggttactcgtgcttcttgtcggaagatgagaggtgggggttgggtaaaactcacgagaaccatgcggcacatggcataggtggtagctattgtcgattagttttctatcctcaaccggatctcatatcggcagacgggtttactcaccagcaccgaggccgtagaccgagatgaggtaggggtacatgaggtagctggagcgggaggtctgcgggacaatcccaatgtcagtctcttgttctttgcgaagctcaattgagggtatatgtgccccttccggaggtactgaccttccaccattggcgcttgccatcgtggttctggaagagacgctggtagtagggcacacggttctcacggaacacgaagctaaacagagtcaatcagtcagtataatttgcaattagatggcgggatagcagggcccgcagccgcgtcaatcgcaattggactccgaagatcgcgggaggaaattcgatggtcgcactctcaagatcgggtttgcgcgcgggggggttatgcagcaattcgaagggaggacatacccagccatgcgggagctagtagcacggaacattttcgcggttggaagcgaagaaagagcggggatgtgaggtacgacgtgggcaagatggggatgtgaagttgatcccggaatgagctggatatcgtgtcacgtgttgagcatcacctgatcgaatcagacgttgcatctggtcatcatcccaaaagggaaaagcgccagaaaagtgcccagacgcgtatcaactttggaatactcggcaacgaatcttttggattgacgtcaggagcttgaagaaggatgtttggcgtcgagaatttgctttcccgaccttccttccttaaccactcatgcgcccggcgcttctgcgactgttgaagaggccgtccgccgtctcgattcttgacacccttacagccacaccgatcggaattgagcaattggagtccaggtacaggtgtctacggtgtcattcgggcagcgccaaacaagaaccactcgaggaacccgacaataggccgacccggcatcagcttgagaattcatgccgagcgaaacggccattcagctttcccatctacgacattgaggcctcgaacgaaccaaatacttttgcgcccacgcctcctgtggagagccgaacgcataataacacgacacgatgccctattaaacttctatctctccgaccggacaagcttgaattcgaatcggacgtcggacacctcaacaacattggaacgcgattagtggacaatgcggagcatcgaaataatctcgatctgtgggaggagcttcttcgacaccgtcagcgccattacggcgacaatggcacactagaaatatgggaagggttgagggtccgagtggatggtgtacggcttccggttgcaggagagcaagcggacttcttttggcagaactttgtggacatgggactgagaagagaaatttttctcaaggaggttattgactatgctgtcattctacgggagcaacaaggcaacggatggccacagctgtatgagcgtgtggttggtggatttcttgaccaaggcttgacgaaacgtgcggtcgaatggcacaagaagcttcaaagttctcatttagccagcgcaaacgatgtgctgaaaattcttccctcggcgatccgttcttcgtctcttccggctggcacggaatttgcgacttcggctgatctccagcggtcgtccttgtcgccgggattgcaggcattccaaaccatatgctccgcgacacccgaccataacttttacggccctgtcattgcgacgctcgtgcagcagggccacggcgaggcggcgatctcaatgcatcatttccttgctcgacgtcaggatcacccacagagccccgacgagatacaaccattgctggaatatgttgagagattcgggctgcggaaagagttcaatcagctccgtggctatgtcaaaaaacggtttgataccgaagcttcgattgaccaacctggtccaatagatgcagccccgaaatccgaggagaaggggtcgcaagacgaaaaacccttcaaagacgacattggtgctaagctgtttgctactcgcgctctcaatttcgatatgatcgttggtggcctgaagatgctcggtgtatcagagatcggtcaccggacgttgcgcgaactagccacgagagctcacggcaaccaagatctcctggacaagcttaaaatacttaagcagtccggcatttctacaggcagcactgtattctcgcgcttgatccaaaaacttgcctcccaaaaccgcgacattcttctctccgacttcctccgcagcgatcagcatcctgatattctcgaagacaagcgtatgcaggagtccatgttggtgtcttactacatggcccgggattggcgactgtataatatgactctagcggtgttgacggaactatactcgggcgcaccagatctctacgacatccactttcgaaagcatattgcggcctgggaattgaacgcggcgtctaaggtcgccgatgagctagccctccgtgggcggacgttgggcgaagacagcgtggatttcttggccgagcagattctcacccctcggcgaatgaatcaccgcccgccgccgggccaacgcctgtccgccgtggacgaagtgatgttcatcttcaagattctaaagcgtgtggttcccgccggagggtatgttagtgctgcattctgggttgagatgctcaagcgtcttggcatggcagaggcgtgggcagactgggataaactccgagattgctgccagtggctcgttcgacaatacgcggaaagccgtgaccaaaagcctgggctgaattttccacccgcgaaaccgtcccttgatcccaccaagcaggccaacggtcgcgatcggcggatgctcgatctggtctttaccccacaaatgcaagcggccatcgtctcctggggcttcatgttccgagtattggacaccaccgcatctaaatttaccgtcgccccacctaacccccaaacggatgaaagactcattccatgggtgcgggggctgattctacttcgagagctggaacaatccggtcttcgtcttgacaagcgattgatctcacaggcagttcgccaccggctggccatgctttacagccaccatgttttgtcagcgcggcgcatgaaccgcatgttgcggcggcggaacccgtattccctacagcaagtgttgaacgatgtgttccaggcctggggcgatccatctctctttgatgggatggaacagaacttggaacagctggtgaatccgccacgagcgagcagaacgaagcgacgtgctccaggtatacgtttgtcgcttaaaggactatgatacctgcgtccacatgtatattagcagatgtgtaaataattgattataatacccatattattcgagaatcgtacgcgtataggaacaataaaattggatcataatagttatgcctaagatcactgggctatgtcacaaatagaagaggtcgattggtgtaaatggcccaatggcagtgcaattgtcgatccaccgatctaagaatagttgagagggcaacgcggccttgtcaacattctgtttatttgactccttttcttcttcttttccttttatattcgattcaaattataccgtttatactgttacatctcatacatcatttgtgtacagttatgcgggtattcaacttcctggcactgttgcctgttgtccttgcgaaccctttgacccaaacaaagcgtacgacagcgtgcaacaactctcctgatctttgctccaagtcctatggagaaattactcatctcggcgcccatgacagtccctttgtgcgtgacggtgatagtggcaactcgatagctgccaaccagtactacgacactccaacgcaactatcagccggcgtccgattagtaacagcccaagttcacaagagcaactcacaatggcgcctatgccattctagctgcgacctgctcgatgcagggttgctgagcgattggttgaaagatatcaagacatggctggatgataatccaaacgagggtgagttagttccgcgaggacagattagaaaggaaattaacactccgaccaaaatagtcgtcactatccttctagtcaactccgacggcgccacagcctccgaactcaacaccgaattcaccacagccaagatcaccgactatgcctacgagcccacctccccaggcaccgccccaacaacctggccaaccctccaaagcatgatcgacgacggcaagcgactcgttgtctttgtggcctccctagagaccagcaccagctacccctacctactggacgaatggagctacgtctgggagaacccctacgacgtaacctccgcgtcgaacttcacatgcgagccagaccgaccgtcaacatacaaaggcaacagcgcatccgcactagcagccaacctcctcccgctgatgaaccacttcctgtactcgagcaacctggccatcctggacgtccagtacccgaactccagctacgtggggacgacgaacgccgcgtctggcggaacgggtaacctgggcactgcagcgacaaactgcaagaaggcgtggaatggacgacagccgacgtatatcatggtggacttcttcaaccgcggtccagcgattgataccgtcgataacttgaataatgttaccaatccggttggccgcaagtctgtctcgacttcggatgcgactagtgatgcctcgtcgacgagtaatgtgttcaaggcgctggttgagctggcggaatcggctaggtcaggcacgtcggtgtctatggggaattggatctggactggtgggaactgggggaatcttctcggtggagggatttccttctgagctgagtggtttgacctcggtttctgttgttttgcttttttcttttttttctatttggagcgttttgacgtcgtttcttggatatccttttgagtcctgtgatacctgtgatatgggctgtgcactggctggacagtgcatagcacatgggtataaggtgtttgcatgcaagggcaaggcgttttggattagaaagctgggatgggatagcgggtttcagcatcttcccaaggtcatatagttatagtctctacgaatggaacgattctaagtcaattgtctgtgtttcgatttgcggagttcaactctactttcccaatatctgctgcaccttggccaccttatcctcgaacgattgcactttgtcagtcctaataaagacaattagcaagagagatggattatgcaagataagatgagcaaggagcatagcacagtaaaaagcaaactcacctcgttccaatccgaacatcagtatggatacgaacaactcccttctgatggagaatggtatgcgcctgtccgataacctgatgaacccggtcccaagatccttctacaaaagcagaaaagagtcagtaaatatataaatagcgtacacaggcctgtcagctctcggcgctcggctttcagcgctctcctctctttctctcctgtgatttcagttccagctgcagacagatacgggccacagttggtggagatgagatggaaaagtacaatgtccacataggagctggaactggaactggaattgcggaggtggccaaggtaacactataatactatactactacatagtgtacatatgtagtatgtattatagcatcgagacactccatacgtaccaagggttgtgcctgcggaatgcatgacatacttcaagccgcatgtttcaatcatccgatggacgtcagcgacttggtctgagaccgagggcgaagaggtgcccatctgagattatgttagttagggagaatgtgactccatatttagagaggcttacggggaccagacagaaatcggcgacacagtggtcgggggttgcaatattagacatgttgattaaatggtgagagggtgagatggtgagatggtgagagggtgaagtggcgtaaagaggagatggaggagaagatataaagagacgagatgaggatgtggtcagtgtgacaatagtttatccgcagggacatttacgacatctttactcatttccatatctaggtaggtatttctatttctattctatttctatttctatttctgtttttattccatttacatatttactaaatatctaaccctcaagcctctttacatatcacatctgcacagtctgcatctctgagatatcttgctgaccgccattgcccataaatacggcttcattggcctttttccctctgacctttgggattccccctataacttcatggagttcttccattccatgaccccatgattccatggttgttccttgttccctcgactcttatgacttcccaacgttgatatgatcgacgggggtacggaatacgccactgggttcttatcgattccccacaactaaaccttttgggattttcgaatgtcgggcttctttgtccggcttctccgttctgtctcgaaatcttctttcgggctgtgagctgtgtgttctcttgatttcgcactttcgaagctgattggatatcccagccttggaagattgatccggttaaactcggtttagcccccttgggattcgggtttaagcctcgcactgggatgcatatgcatataatctgaagtggattgtttcaaatacatccctccacctctccacctctccaccttctgatctattcaatctattcccctcttgggtggcggtgataaccgaattgcctactatcattgcctactatcacgtcatggtcatagagatagttttggatctccaccatccttctaacggatgaccaaacccaatctccttgagctcccctcgggagttcagctcgtttacctcgccgagggaggagcaaatgtgatttatcgattcgtcagaaagccagttctcgccaggaaagacccaaagaggccactacctccacctacacacgacacggatcattgcaacctaccaacccaacttaaggggaaattgctccgactccgcaaagaaaccgcagctgacatctcttacacagagattgtccgaaacttcgacactatcatccgaccgctattcaaccccgaagaactagtcgaccaaaccctcgtcagactcccagagggtctcatcgccagctgcaacgagcaactccggactgccgaactaaatggcgcacgcccagaaaaacgccatggcagctatctctgtctacatgagccattcggcctactaatcactgatatgacgacggccggagaccccggcaccaccctggccgagctaaaacccaaatggctcaaccagtcgccatcagcgcccgcgacagcacataggtgtcggacctgtgcgctgagggatatgaaaaaccgcgagtcgcaactcctaggtcgcaaagagcaacggtccttctgtccgctggatctggtgtcggagcagtatgagaatgtgctacgggcgacggggtcgatcaagggctgcaaggatcgatcgcgactggctcgcattttgtaccggaacccgacgctgcagagactgcagtctctgcagaagactgagagggatgttgggctgcacggtccggccgcgcagtctcgggagatgtcccttgcgatgacgttgcgggattgtacaatgttcgttaaggtaagttcatgctgcgagtcagggtctgtcatggtcaaggtcaagatcatgtcgggaaacatcatccagagtcgaatactgacctctccacagatcccccatgacgaaaggtcatctattgagatccgcctcggtgacctcgatctgaagacaggcgccggcgggaaagcgggctactggcgagacctggaaacacgcctgattgatcaaggctggtatcggggaagtaatatcagtcaaaattcgggcgagtgcgctttgcatagcccgcggagaccctcccagtcttatttagcatgagactgtatcaactcgtgtggaatggcattttttggtgatttgaacaaagacaacagatgccttgagtgtgatagtcatggctcgtttgggttgtatagtaattcctttatgacttatttttgggggctttttgggacttcttattgtttttgggttgtttttgggcaagggtggttttctgatattattctttaatgactgcacgtttcgaatatgatttgtaaaaacgtcctcaactgatatcggtgggaaagagtcatctaaagctatgcacaactccataactcctcacgtatggatagtgtgaaatgctggccggctggccggctgctcggatcgcctcaaacaaggacgccgagaacatcctggaattcttgagacgcactctcagtagcagctactttagcatgctggtctgcctctgtattccattctcttggaatacgccagaactgaatgcgcattcctctttcatcccatcgctccatctccccgagtaaacactcccaaaggtccttgtttttgacaggcgcccccgcactcgtcttccagttgttccgcacccatcccttcacccacttcgtcataccctcaacgacgtacgcggaatcagtggcaatgactagacagcgacatccttccccagtccatgctcgaaaccgcatagcggcaatgacagcgcgcagttcagcccgattgcttgtttgcgggtgctctatgcccgtggggccttgcttctcgagaggaaagcttgtgtggccacagatttcagggttctgggtggagtttctgtagacaaagcaacagccggctcttggattggcaccgccgttgtctaagcatgcgccatccgtgtagatcaggaattgggtttcatcgttgcgacgaatgaaccgatacacaggcggcgtggcgttgtgagttttgcggagtgggaaaagcgcctgcggcgtgttgcttgggtttgagaattgaactttgtagggaagacgcgtcccgtgccgactctgggctctccacgagacgtgggcgcaccgataacaacaagaggaggcccatcaatttcgtctgtgtggtcgtcaaggtctgaggcttctgagtcatcatcgtcctcctccattaacacctcatccatatagctgtagtcaacacgaggccgatcaatgtcgtctgtgtgactgccaaggtctgaggcttctgagtcatcatcgtcatcctccgctaatatctcatccataaagctgtagtcaacggtgcagtagccgcagattacgagtccgtgtggtccgcagactaggcgaccatcaggaagtgtcactgggtaatctggacgccaggccatgttggatacaatggtttgaaatgaatgagctgaaagtaaagagaatgttctgcaaaggcttggactcggggttccgagcagacatgtggagtagaaaaagtcttaaatgggtcgacctcgggaggttgaactatgaggatctgcggggagagagagatcacatttctgttaacatgcctattcgcatctctccttccaccaatatactatttatttccctgccttcaatctattcgcattcccccgttttagtgctcacctcttcttttgataaaactcagcagtccattttatccccagtgcgtgctgagtgatcacatatcccattctgttgacatacctgcgtacatgcaatgtgactgagctctctctgagcatttgcctaatttgtctcgtttgtcatgtcgtcgccttatacaccgcctcctttccatagatgcatcatcacctttcttcttcgcgattttcccaacacatcccattcggtcagctcgtcttgatctactgacgttcaaaacaccaacatagtcactatggtcaaccccccgtttgaaccattgaggaatcatgaagtcccctggattttatttcgcgcatcttgcgatggcagagagtgcgacaaatgctgcgaggaagaacccagaagtcttatcgactcgtctaattcgtcagattcttcggcattcgatagccacctctcatggaaaaaggtcccaacgccattcgtcagcttcttcggcacctggacaagagcaatgcgatggcgtgaatggttagagagaaatcatcatacggacatcaaagtggttgccctctgggcaagagacatgggccacgtgtataacgcgatgacggtcgctttgggcttgggatactcagatacgggctctgataatcgacgaaagcttcgaaatcatgaagatgaatacctcgttgacgctggtgtggatgaagaccgaatcttggctgtgtttcgaggcggtggtgatcttcgagctatcacctttattggccctttctacaaggtcacaacatcagtgcccagtgaatacttccttgcccaagaaagcaatcccctcaaagccttgggggagatgatattcatgaacacaggagtgtatgatgatctttggcgggatcagctcgtgaaatcaatcagcaatttcacttgcccaatgcagatagattactcgaggggacgattccgtccgcagcttgagcgggtctattactagcggtttaccctcgtttgtgcctgtaaaggcgtctgtagctcgcgttgtgttcggtttgagccgtgaggttggaatatcaaatagtcctgatagccattgggtgaaacgagggtgatctctagggctgaccatgtatctgacataagacattgcaactaacatttattactcaacaatattacagcggagccaaaaaaaataccacggaattaagatacaatgacatagttaaagtcctgttcctccttcaaccttcacaagagacactaacacaagaccctggtgcctcaagttgctcaattaacgatctgtatgcagtagaagactctctagcgcaggtgaggatgcatctgagaatgcaccatcagacgccatcgcccgacaagccactctccggggattccagcgcttcatcagacgtagagcgtccaccgagaagaccacccaacaggccactctccggggattccagcgcttcatcagacgtagagcgtccaccgagaagaccacccaacaggccactctccggggattccagcgcttcctcaggtgtagagcgtccaccgagaagaccacccaacagaccacccggctcgtaaccacgctctgtatcagagctgtctctagcgttcagcgccgggaggggcaaggtaggcgccttagagaggaatggggttggcttggctggtctcttcgtcagggtggggatgggcgtgctggatgggaccccctgattgcctagcccaccaagtccattgaggccgctgagggggagttgagcagcggcattgctgctcagagctgtcagggtggacagtgtgaggaggatgttgatgtgcattttggcttcttaggagattggaaattatatggattgttgcctggttggatttgaattctgaggagaatgttctcaatcgagggtttggagtttattcaaaagaattgatatgctgggagtgtatgggaaagggtataaatataccggaagagagtaaggaggtgaatggatttgtatagatcacatcgctatatgatggaagcgggaactagatgaagatcgtgatcccctttatgaagatcattgaagattgatctcagccttgacagatcatgtcctggagaggccgtgatagtctgtagcatttgcttttgtgtgatgggattcttatagttcaatattgggtgcataaattggagatcgctggctacattactggattaagtatgtacttctcttttggctcttaaaccactgcatgaatattccatgggaaacaggcatattgcctgtatgtgatgcagatcaggttcggttcaggatgtgattgttttgatcacacaatagtgatttatatcgttcaaggtaagagactactgtgcccgtgaggcattcgatatatataatcagaatacggagtacatcgtacattgtaaaatatgcgacagtctaatctacagagtaaaaatatctgcaatataccgagcacaggatctccccccttagagccaagagatcatccccccacttcctgataagagtcacacttcaacttcttctctgcaaaacacccgtacagcatacggaatagaatggatccaaaagtcggaatcggtgtcttcgtcttcaacggtgcaggcaaattcgtcatcggcaagcgaaagggaagtctgggcgccggtacgtgcatacaataccctataaaccccctacacatgcaacaaacaagcaaatataagctattggaatcaatccttaccatttgtgattaaaggcacatggggattaccaggtggacacctcgaattcggcgaatccttcgagacctgcgcgacccgtgagaccctcgaagaaacaggtctgaagatccaggatgtgcggttcctgaatgccacgaattcgattatgaaagcggagaataagcactacattaccatttttatgggtggtgtctgtgacgaaggtgttgatcctcgggtaagttgatgtttgcttcttgtggttttgcgatttttatgcgaactggattttttccttgttttattgcgtacccccgtatccccatatggccgtgtactggaacagaacaggatatgtggcttacttgtcggtaggtacttgagccggaaaagtgcgatgtatgggaatggatctcgtgggatgagctgcgggcgtatggagaggaggagatgaaggctggtgctgggttcgaggggaggaggttgtttttgcctcttttggaattgtttagacagcgtccggattttcgggtttgaattttattttatttttatttttttatttttttatttttttccaacggttcagaattcatactggagctataacatatgaaattggatgttcggaaacaactactctgtatacgattcaagagatgacataggcctcttaattccttctttcaccccctgatcatttcatatggagacaacgttgatactctgtttcaaaatccccttgactgtaatgtcgatttaatatccaacccgaattaaggaacaagcgagccagaattttcatcagcagcccgtttgatccctactcgcaggataatactcgagatgtatgaccgaattgcctcttgtaaccatagtggcaaggccctaagtgatccagccactgtgaaatgtcgaggaatgatagtttgcccgcttttccgagtaacaatatgttccaccactgcctgggagacgtccttcggatccaggagtggttgaccgaagtcagcttgatatttagtgaagcctttgatcatgggcgtctgaacccaaaaagggtgaatgatactagctattgttagcacgatctctcttcgaagaaagactttcccaaactaacctcgtccgcacatttggagccttgtaccaatatttcaactcttgccgaaggccttcttgaaaagcaagagcgccagatttagcacaagcatagtccaccatctcgcctgaagtgacaaaactcgccatactggctactgtaatgacatggccacggttcatacggaccatagatggaaggaattctttcatgatgagaaaatgggcgatgatgttgacatcgaatgtctggcgcaatttctcctctggcattccgagaatggtgccgtggtggtaaacgcctgcattgttcacaatgacggtcggctctccgtgcgacttccgaatagcagtgcccgtttcggaaagggagctggccgatgttatatctgtttgatagaatgtggcgttctctggaagctcaaaggtaggccggttgatatcgaggaccacaacgcgtactttctggcgagaaagatcttccattatttgcctgccgatgccaccactgccgccggtcaagaggactagctcattctctgggatccatgtatcgctgacttggaagttgtttagaactcgttctgagatctttgtatggaggtagtagaggactatagagcccatcaaaacactcagcgaggatgtgatgattggcgcgctcaaaaagtcgaacatggtgttaatagggagttccgataattacagaatctagtctgagtagtcctcaaagtagtccacgaaggggcacaaatagaaggcgaacttggtcaaattctgtagctgatgtgctggcacagttgtagccagagtattacgctagcatggaattgggaaaagagatgagattgtcaagcaactgatacaaatgaggggcaacgtgttattttatcatgtgaataactgaataactacctaggtagccaatataaatggtagcacggaaggttattcaacctacctaagtactcaagtagtaacggcctttgtccccacacaggggcccaagggcctttttagcttcgagcaagaaactagagacaaggactctgagattactgttgattcttcggggcatgggagtcaaacagggtccagaactttgataattaagacccgatgatagagccaaaggtctttcccatgcattccaagatatagacaaagagggaagaactcgaagagcagcaagggcctcgggactatctgactatctccccggattcggctcgtctaacaggcgtatttaaaccaaggataactgtgctttatattgaaggtatccctaatatcgggtttacggcctcggtcgcaaaccagcgggacagtcttcttcacccctttcttagtgaattttgagtatgcttgtgactgcatagccatagggctgcgcaaaggtattcatgcctctctcccttcctcatatatacggtattgctaattgagcggggggatcgggaatgtaaaggtctgcgggcaatcaggagggcctgtaatgggtacaccatcaggaaccacaggacccgagaagcgaggtttctatagtctttccacgaggccgacgaccttcactccaattagcccaagactgggtatcaatatagttaagataaccagaataaaggatcgggtgcttccaaactaaccctataagataggcctcgcgaattttttaatataagtaacttttcgatgtgcagtgccaagctgtcaggatgaacatggtgatagatgagaaacttcaaggctagatagacgtaaggattctgatagctagtcaacagccaacatggatagtgagtataagatatatatgtataatacagagtagtatagtagaaggaagattcataagagatcccctcttttatagcatgtggcacatatggatttgtttgcacaaagcaatagaatgtgctagaatgctgggttaaagtgaagttgatagaaaagacttcgcagatacccgccaagcccgagacaagaatcgtaaacaccttggcatttgcttgatttgcttgatttatagaaaattaatagaggaacttaatcaactagaaccaaaaacccagtcagatacaataacagcgatagtcgaaacctgtacaactgtcagtcaatctatcaatatatatataccaagaacccaaagaccccaaagactcgaatactcaccaatgaaatatccactccaggcattacaatgacatccatagcaggtcgatacccctgcctagagcctctcatcaaagccaatttctcattatggtgaatactctcccggacttcagcaaccttcctatctccgtcaacaacatcaaaaagcgccagcgcattcccatgccgttcaatatgcaaagtgagcattttctcatctccgcgcttcccctgaaaagcagccgcattctcaaacgaaagatcaaaattcccaaacgaagtattccccagcgtccatcgcggagcgccagtagctatcgtcgcagtatcacacccgggcaagctaaccgaccaactatttgtccacgaccatttccgatgtaactcgaaaagcggcagacccgagtcatcgcggaactcccgacacgaccgatccgtgtatttgcgaccggtcaccgtgaactgtggcgttccatcttcttcggtgatcttatatgcgaaggcggagtggggactgccgaatggtctgagtacgagggttgtttttgagcgcgctatgtattggttgcggaaggcgatgtcgcggtctggtgagcggagggttttgcggggcttggaggaatatgactgcgatagtcgggcgttggagtaggtggcataggacatggttgttgctatgccgtgtttattcacaatacgtgctgggattatgcggggtgcctcttatacctccagggttggattgtatgggcatatcttgcgctacttagcgctacttatccctgttgcggcatttgtcctgtccaatgcccgatgatctcactgatggctgagccacatgccaagaaatatacgtgaagctatcccctcagggcttcagcggggtaagtggaattgacttgtggctacatccggtctcgaatgatgcattttaattaatagcatggattcagccacttctcatttatcaaatgtcaattgctcttgtatgttgtagaactaccaattcagtaaagtacatacaaacataggagtcaaccttccaaggttggatgtattgaagcaacaccccgggcccccatatctgctgagtcatgctccagggccctccagggctggggccagtgctgacctccgaggtctgttaggcttccttgaatatcatcacatctactccgtactgattactcgtactgattactccaacatggctgggaagttcgccgtcagatctctagaccacttggtcctaacagtccgcaacattcccaagaccgtggcattctatacaacctacctcggcatgcggcacgagatctttacctcaccagctaaccaatccatccagaggtaacccctcttttcttttcttttttctttttcctctcttttttttcatgatcttagtggatgttcaaaagacattgacgataacagacatgccctcatttttggctctcagaaaataaaccttcaccaatcaggcaaggaattcgaacccaaggcccaggacgttatgccaggaagtgccgatttgtgctttttgacagacgagaatgtcgaaaaggtcctggaagttttccaagaagccagagtcgaagtatggactctcctttttttttttccctctcgcaaatggtgcaaatggtgcagataagagactgatctctacagattctggaaggcgccaaggttgtagaaagaaccggggccgttgggaagattcgcagtgtatacgtgagagatcctgatgggaatttaattgtgtgagcctgttcccttctctcttggagaaacaagttgattaaccattgcagagtgtcgaactatgtttgatgaacccgcctgggacctatagtcacagaccttttctttcccctttgataccatgattttttcatgttcctcctataaggatattgggacaaattccgattataccacagtcttcacgaacaaagtctcagatcttcttaggattgatgcaggcaactggattagaccttagcccacatctttgatccggtctttattacacgagcagcgaccagaatcaacgcccccagaaggaaggccaacccgccccagatctgcgctccaatgtagctgtcggctctagcaatgagtgctccaccgaggggtgggccagtcagacaggcaaagctcacaatcgtaaagcccatacccatgcggactccggttttgcttaggtcgggcgtaagactcgagagtgttgatggccagagaccctgcacaccattggagaatatgccgtagagaacggcaaagacgtacaggcctgccgtggaatggacggcagcccagcaaaacatcatcacgctagcagccagagtcaggggaatgatggtgttgagaggtccatacttgagatcggccaaataagcagggataaggcggccgactattcctgctccattggttacgatgatcaaattgtccgagtccgagaacgtcaggcccaaagtgtcacgggcaaatgcaccaatgtaatagaaggcgaagtataacgcccagaaattcagaaacatgcccagacagaaaagcacataggtaggttccttgaacgccgaccattcaatgagggcgccagccttacgcgggggtagtcgagtttggaacaggagaatagcagggatgcttgtcccgagcatgacaaaccccaacaccctaaccgtccaaccaaatccgatcgacggcaggagagccttcaccaagccgggaagaagcatacctccagttccactcccaaccagacaaaatgccaaggcaaacaccttcctccccgagaagtaggtcgcgaccagactcatcacagggcagaactgcagaccactaccaaggcctgtgcagataccctgagcgagaaatagctgccaatagcgcttggaaagcgatgtcatgaagaccccgacgagctgcagaagcaccccgacacaaaagaccgagtgaaagaagcccgcgtctagggcccgaccggagaatgccccgacaaagaaaatgaggaacacctgtacggatccaacccatgaaatagccgatgctgaaacgccaagcgttgattcgtagtaggcctggaatacgccgaaggtgacgatgtacccccaggtgttaaacaccactaaatggcccatcaaggcttgtgtccatgccttcagccctccatcgggcggggcttcgattcgggaagattgtctgtcgtgtgaagactcggggtcttcattattctctgtcatggtgggtgcagtgcagtatgaaacccccaatgtgggagaagagttcaagtaggatgattggaactcttcgtgtcccaattccggcgtcttgaattgacattaatcgatgaacgactcaaaagtgtcggattcaagaagcaattgcaacccgtcctacccgcgatacccgcgatacccacggggggctttttgaagagcgcactattgttgggcgtgatatatataatacttcaggatatatggagggttcattagtcgatacatccgggccactgcggagatccgtcttatataccaagcgccggctgatcgaccggctccattatttgcccaatccggctgtctggggctgtctatggtacttttgttctaactttccgatccaaccttgcatgtgggcatctttccctgagtgggcaattggggctttacagaatacaatgacattgaaatgtttgtatagattgggttcgtgacattgcagatgaagctgagagcattattggccatttgaactcagtagggggaatccccttatagtaagactatgctcccaccgggatacctcgtagtcaaatgaagcagtggctggaggacaatactcaagtatctgagttgcgattgttggtattaggtgccgtatctattgatgcattgtgaacccatacccacatcaacagtctccatcaactcagcattttgctatatggcagtgtattgactgcgttttcacgcctactcttagaataatcttctcttctatgactttgtatgtagtgtaatgtagacatcatttagacctatgttgtactataagaagatactaggtgtttggtagaatcacaaaactacggaactaaagaacccacactttttgcctgaccaattggctaatgcccagcattctccataaaaatctggcggttgttactccttacagggtcacagttcatgcggaatgtcaatctcaatatcaatgacgacatcgtggatcagccctgagcaggatagggccgcaccctgctcgcgtaaacagatcacccgtataaagtatctgaatgggtgaatcatgatccttacaacttccaatagcacaaatctcgccgaatccccgaaaatgttttggatttgcccaatccgtcttcggggtatcctgttttgatatgggacggtttttccgaaatatgaagtcttgatgatatgtgtggaaagggtttataacataaatgttgttcgcacacaacataaaagcttttggaattcaatcttcccactatcaaagtcaaggatcaccatctacatgacaggttcaggataactgttccgtgatggtccccccccgttcccgggcggggccggctagctcaggtacgcgatgcacttccattctgtcgattctacattccaattcttttcttttcttttcttttctttttcttttggcacgcaatgacgatattctatccgtggcttaccattcatggtgaaatttgataccttatatgtttcaagacgggtttctgagtgccgattttaccttgtgttttgcaatctgtgtcttagttatggacccatgctaacccaagtgaagtctctagggatcttgttggaaatagaacttgatacttttatcatagtcattttggcgacattcaaagagtaatatagtgtaggggtacctgttttccaactcttttgggcatatggtagcccccgtctttgctagatagatagttgaatagctcaattatccatttatttacatttctccctactatttcactttaaagtaattatttaaacccatacctaggtacccatgtacttgatttctagtccttgccgctttttgctcattaagtagaactgatcccattatatcccattatatcactcatgacatttaaagaaattttggtgttctcgatcttcggtttttagcaccaaaccaaagtgccccgccaccaacaatttctcgtgaacctgttaatgtgtggctggtgcatgacctaacatcctggattctgggggatgagtcgccgatacaccctcaccggtataccccctggagcttgttgctgccgtcaatctccgttcgttggtaggtagctactcggggtgacaagttccgtggattacattactctattaaagtgcgacgcgttcatgcgctgtatcaaccatattgagagtggcagtaactccgattcggaagtccgtaagctaagcttggaagagttggctttctgctccattagtttcgaaaggaaacgccttagcttcgttattcgccattttaaagcgtcgaacatacggtcttacagaaaaggcacgggcttcctaccttgatcatcctgaagtttccaaacggctgagacatttatctgcagaatctgaaggacaaccattttatgaggtatatggggctgccaatgaagcacgtaagaattctcctgagagtctaccgagccgggcgagcataaggaccatcaaaaagcaagccagcagaaacccattgttgaagcggggtcggctagccgtcgaaggaagatcaaagcgaagagaacagagacagagatggaaatagaaacagaaacagaacagatctcggtcatcaggtgtcattttcgagttgatggaggaagatggaggaaagtggattgctgaatggaaaaacaatgcagttgatgtacacggttctgccctcacagggttcagcttctcgttgacgactactacgccttctcatccagtcgcgagagagcgtcgcatagcgagatgcgaagttcgggcgccgccttggtcagaccatcagcgataaactgcagttttttacctatccaaggtgtcccacttctttcggcgagagccgaaagcaatcttccataagcccaacaatccgtggcaacccttgcctcaaacggcgtgttggcagggcttgtttcaatgttttgaatgagaatctgcatctcaggtgaaagccattcccacacgtaaccaccggtcccgctaacatcgatcaggacggcatgttcaccggcatccaaaacgatatttgacggcttgatatcaagatgagtacgccctctcttgtgcaataatctcaatgctatcccaatttgtaaggcccattgtattagcaaagtatcaaattgagactcaaattgagactcatcctcgaatatttgctcaagtgaccctccggaatagtattcaagaagaaatcctgtgatcactattggcatatcggttgacgggcaggtcttatacgggttctctgatacaactaggccaactagctgcgcgatgctcggaagcccgcggaattgtgtaaggacgtcaatctcgttcaacatatgttccgtgtcttcaggctcatagatagggcggtcaatcgttttgtaagcaaatatatgttgctcaaacataactttggagactgttggagcgataacatcaatagtctgcaaacaaccagcctcaaatattggtaaacatcgatcccgctctagagttgggtacgttgggtacatgaccctctttggatcttctgcgatcttgtagcagatttgataggcaatggcaataaagaagttcgctgggtcttgatggccatgcccgtcccgtaacatgatcgagttttgactttgcccggtcgaggtctgactttgctcggtcaagcttaaagtaatgtttgtcacagtatcgtctaaaagctgcaattggccgaaatcaatcgcttcaaggaattcttgaaagatggaccggcgtttcaaatagcccagagctaatacctgtgttggcagtgaccaatccacggtaactttgatccaccataaagagccattgttgtgaaatatcagggtctgtgatggacggtcaccgttccagtctcgaaatgacttgaattccaatctgtacaagggtagcggctcttcgggcattgcgatcaattgcagaaggtgggcactttagttgacaaaataagagagaggaataaacgaaaaatccctgaaataaactgactggaaagggggaaggggtggtagttaagttgatgctcagatcacgtgtggttcataagaagtttgactgatcagatttggtactcattcatatcgttgtctttctttggcagttattacatataccaggaatccttccaaggtttgattggattgaagttgtcaagcatttcaacggaagaaatctggctgagaatctgtagtatactctatcacttgacaattctctccgataatgagatatcacaacaaaatcgaggcccatcaaaaagtcgcaaagtagatagatagtatcgtgccaaggtgcttattcgggcatagtctgagcgtagactgagtgctcaatagttagatgcctcccgaggtctgacttacctgctgataaatagttaaatccgtaattccgcaatatcacgaaatcgccgtagaccgggtaacaccccggattagcgagtgataagcaagagcctgcaggtctatataaaccacaggtccacagaaagaaaactgtacacttcactcgcaatcaaaatgagaacccgcctcactcaatctcccctacacgccataacccgcacagcattcagaatcagcccagcacacctggtatcccgtcagacccatctatatcgaacccaaacacaaccactccgctcattctcctcttcaacccgcaatctggctccagcaccagcaccagacatgtctagcgctttaatcaatctcgctaagaataggcgcacgatctacaagctcggcaaggaaagtccagtcccagactccaagatcgaagagcttgtcaatgccgccatcctacatgttcccagttcattcaatacccagtctacacggctagtcgtgctcctgcacggtcagcacgacagactgtgggatatcgccattgaggctttcgagggtcttgttaaggcgggtaagatttcgcaggagatctgggagaaacagacattgcctaagttgctcggttttaagggggcgtatgggacggtacgtagtttggctttcgctttccctttcgaattcggttttatttccttgaaactcgaggtatccagtcctgtccatagctaatcaatacccagattcttttctatgaagacccagcccacatcaaacccatgcaggagaagttcgctacatacaaggataatttcctaccatgggcagaccattcgaatgctatgcatcagtatttccgtatgtccatttctttttcgtttcccttcgtgtgtcctttcttcgttctaacgtttaccagtctggacgggccttgaagcgctcggctttggagcgaacttgcagcactatagcccgctcattgatgctggcgtttcaaagcaatgggatctgccccgtgagtggcggaatgttgcccagttagtctttgggagtcctgaggctgctgccggggagaaggtacagaagcctgttgaggagagggttagggtctttgggaagttgtagggtatagatacagataaagcaggagtaaggaggaattagtgtgtatagacactctggtatagattaaaacatcgtaaaagggatagacaaaaccatcacggtcgtgccttgtccctttattctttccagcttgattgccccttcacctacacagttacagcgagatgtgttgtttctccaccctttggggtgatgtacgatatcttcattgaagggtactgtttttgacgcgttatatatgctgataactcaaaaagtcccatttgatttttgggttctaccgtacaaagctgtagaagcccgcccaactccgacacaaataccagaagcattgtctcactggaaacctccttggtcgatcatatactcgacaacttgcccagtttgtctaacacaaatctagccaattctgatataactagtatcttcaggcagcggacgccagtctaagggactttgagctccccaacgtctttttagacaccgcacgacaccactatgaccggtgtcttggcgtagccagtcccggacaatttgagatgagtaaagcgaacctccaccatttgtggccctaggaccggaaaggagaacggcatccctcgaacctagaagatgtgggaggaggcaaagctgaggttctgactgcggagtcagataatgtaccacctggaagttctggggcactcaccgttctttactcttttaactctgagttagccgaatggcaaatcttcttcctctgttttccatatcgtcaagagaggtggtgaccgtcaccctgccgtcgatagtcttagttattcgcacctcggctgtgatatataggtcactgccatcttgggagataacgaaaacgggcctatgtacgacttagtattagcactgtatagcatagctgaggctgaggtatagaaaggcaagtctcaccgcttggcatcgacctcttgtgtcatgagcagcgaagccacttccgtcgtctcttggatggagacttggggctcatgacaatttattgatcctgccttggcctcaaggatcatcttcattggcccatcttcctcccaaagtatccgtcgacttgcgcctccatttctgcgccattgcccagtttggccttgattggcttccgatggcggcccaaccgctatgtatgtagggatgttcggccgcgaggcataaggaaggctaccaggttcatattaacggggtcctcatcaatcagccgttcttgttttgttacctcttccttgagtagcgccaagataatcctggcctgctcgaccgccggtacttgaaagactccggcccccaagccagccttgatcgcaacggaagagagtatcccagcaacgatggcagcaccacgatagcaaatcgtgaaacccttactgctgggttttggtcctgagaaagatggaataccgtccatctgcaatgtcatagacggttggatttgtcttgaccgtccacaatatataggtgtcttaattgggtcgtagcgagctcgacgaatttttgtaaggagatctataaccggttagcaactggcatatgaccggtagacaacggtacgtgccttgtcgtctctcttcactacagtggaccgaggacattcctcaaggtctcattctgtgggaggttcttcctcagactcagagaaggcagatgaccgtattggtgatcttgccatttctgcaaggttcttgcctcacaatctttgcgtcttcgatgtacacgaccttcgagtaagttagattacgctccaagtctccaaagcaaggctagtagaagccacttacccagtgtctgaaatgctataatcaatggctatggttggtaccaagtgccaagtagtataggatattgtgtgaaaaagaaaagaagatgatgttctcggacgtgatacgtgggaagtggaaagtgactatttgccaaagcaaaaaggaagctggggggctgttgtttatataggtacctactaaacgatggtcacgtcagctcactctcatattttattgatacataccttgtttgaatcttaccattgttttataacctgcattagaaaagataatacctactagtgggaggccaagagaagagcgagagaactgtctctatattcacgacctaaccactggcatgaagctctctaaataggttcatggagacaaaggaacaaaggcacaaagacatgaagacagagagagcctcaaattggcaaaagagaggtttgacaatctgcatgtaagtggcttaccccaggtctatgtcaatgcatcatatttaccatttccatgagcctcagatctatgcatgtccagagaccgggtagttcacacctactgaaatgagaataagcagtcattctatatccatagtagttcagctgttttaatcccagttctaaatcagacattgttagcctagaattacattggccaggcacatatgtctacagaacgtcgtcaagaataacctataagttcaatggagctaagacttctatacacaggtgtcccttggctcaagtatgaatatcagaaagaacaatcacccaggacgacagaaaatagaacatacctccaaagccacacaaaccatctatctcccagtacgataccaatactcagacggatcaccaagacactcgccaacagtaacagctataagcaaacgttagcctcaagccatagacgtacaaaaacacaaagaaaagagaaacctacgactcagccccctcctctcaacatccgcaagcatattatccaccaaaatctcaaccgtatgctgatgcgaatcatgtgccaacacaatcgtcccaccagcatcaacctccctcgagaacttttcaaaactaacccaatttgtatcgggattatcattctcatagtccttagtgtcaacactagccccgataacgtggtatcccagatcggccatagcgccgaggacgacgggcgtatgcctgaggaatgggggacgcatgtaggtcgggaagaagccaaggatgtgcatgaaggtttcttcaagaagtgtcatttgctgtacgatctcttcgtatgggagtacatcgagggagggatggttccatctggatatttggttagtgtatgttggtgcttggactggacttggatagagaagggaggagagtggataggccagtgggtgggcatcaacgaacgtatgagaccccagctggtgtccttctgccaatgtgcgctgcactacgtcgggtgatgtatggatgtttcctctgttatggccgttgaggaagaaggttgctcttgcgccgtgttcggcgagagtgtctagtatctggggggtgtagatgtacgggccatcgtcgaacgtgagggcgattgtgcctgggatagtacaatgagtgattatggctccgactggtaggctggtggtgccgatggtattggtggttgtattggtgttgatcctggttcctgtgggagtggcctgggatagggttatagccgaaaggaatggaattagggggatgaggaaatgcattgtgaatgaatgaatgaagtaggtcggagtatataaggataattggaacgaccagtgatgttgattggagtgatggggtgagggagagaggttggcaaggtgttcggctgcaatgccatctacgctgcttcctaatattcgaatcagacaggactcgatgatttgaacataatcagcattgaatatggctgaacgtttgaagattccacccccagttctcatggtagatattatatcttccacaaataaatatgaatacatcaaattagaaaggtaccaaaatggcagggtaagacattcaacccgcatctttcccacagaaaggagcgagaagatagcataagaacctccagaacaaaagacacccgtctaacccttccgcgtgctcttcttcgcctggcgtctctgtcccttctgagcctcacgctcaaggaacttgcgctgctcgtcggcgcttaatccacgtaggattcgctcacgctcatccttcttgatcttttcggcagcaatgcggcgctcctcggccttctcttcctcgtcgacacggcgcagcctcttgatctcctcttcgcggacgttacggactttgcgcatgacttcgccacggaaatgggcggaggcgaccagcttgtcggataggcataggaactggttgaacaaagggagggtggaggtatagccggacggggaggaggcgaggttagcggatagctggatgcgcttcttaggaatggtctcgtcaatccttaaaacacaaatcgttagcgacggatctaagcaacggatctaactaaaggctcgcacagaggctactcacttagtgggtctgtcgataggctggtccgtcacgatcaagtactcaaagtcattaccagcctgttcaatggcctggatcaactccggggtgaggagggtatcgctaatctcagcgctctcggtcatcacagtgacccacgaggggagcttggggctatccttagagaaggtgagagaggcatcgtagcggtcgttgcggaacttgcgcatgtggctcttgtggacaacagcccagataaagccgtcgtaagtcgagctagggaccttgacgggagcagaatccttggcgagaacgggaaccaggtccttctccttaccatcgaaagcatacgctagagcctcgtatttctcaacgggggtctcccaactctcgaagaaaaagctgaagacatactccataatgaaggtgatggggttgtatcgcttaggcatcttaaggttgacatcgaggaaggcaacgttctggcggccggtcgcatacgaggcgaactcacaggcagacctctcttttagcagggactcgggattggcgagctccaaggtgatcgcctcaccgtccacggcagccggtcgggcgattccatcaaatccgacgacggcaaactccttctgaagagaaggtccgtgggcctgcgcccagtccctcgccctctttcggttcttgcgcgttccccagaggtggaagaggacaatcaagaggatgaccggcatgatcattgcctcctgcttgaaatcgctcggggatgtcctctcccatactcgataccaggcagtgtaggggacctgcttcgcggctagggtgttggctgctggggcgacagtcgagtcagcgacgagggaggcaggcgacgggttgggagcttccacgaagtcggcgaagtctaccagagtcagctcagcaattgaaatgtatcaatcaacataccatcgtcggatttagcctcctgagagccaaacacattcttgaacatgcccgccatattggaattgatatgacatgatggaaaagaaaggagtgggaaccaagaggtggtgcccggtgcggagctaagttcctcccgggtttagcgctatctccagcttttttacccgcatcggaggtatttaggcgatttaggcgatttattcgattcgaggaacaaaggagacatcataatttagacaccaaatatccaacctttctctagggaccccataacctgccccaaaataaataaaaaatacagaaaacccaatggctaatgagtgtggtatcatataaaaatgaaacccccgaacaaaactcaacgccagctgtaccatgacagaacccagttttgtacaatcccgctccaaagaaataccagtttagcccaaaaacgaggaagaacagaaaaagaaccaagaaaccgtaagaaaaatgcagaaaagaaaagaaaagaacggaaaaggaaatcgtaacggtcatgctcgaggattgctcaagtcgaaagggatgtatggaggtaagagctcagtggccatacgccggaggaggactgtcttcgtgctggcggctccagaagccgctgcatgcgtttgtcataagtttgtcctcacgcatacgacgagcgatttcaccggcgagtctgtcgaccaggacaggatcgacgttggcgttctcatccttggagaacggaagaacagccgcaggcaacggggtccgctggttgctagacggtcccgcctcagccctctcctggggataaccgcgcatagtagcacgaggggtggcgtccacatcctctgccttgggtccacggatagtctcatgggagtatgataagtccgcatcccgacgagtggggcgggagaagctgggcaaatgcctttcggggataataggtaggtggcagtcgacctcgggtgacagaggtggtgtgactgggtcatctgatggctcatttacaataggcagaggtgcagaggcgatagaggggggtctagacgactcggtcataacactctcatcgctaacgctcatagcgtcatcggttgtcttagggcgccgcagatccacaacacgcttcttacgtttccgagcgtgggctttggaatgacgtccagcgcctagactcagaccataggtgctggtgctaaatgaatggctagacatggagggtcgactttgcatggaggcattgctggcggtttcgtgaagggaagacatgcttcccatttgcgactgctctcgcgaaagagtcgggcttagtggtgagatcacgctcgaagggaattcgctggtatcggttggagaggtccatgctcggtacactacttcctggatcgacggagtgaacaaggacagagtacgttgcgaatctgtcagagcggccaggcgaaggaggttcttttgtgagaagagggagtgggtctctaccgacgaatctagagagagcgacgcgatttcggactcatttaacgcatttccgagggagtcgacgggatcctgtggcgggctagctagaggatcttgaccggggccttcgcttgacttggctgtgttatcggtctcgtcgttcatttcctcccccgtgcgatattctggaacccacaagcggagcgacagtcgatgaatgatggctgggagttcgtccataaacaatatccggagttgagcttcgatctctttttgtaggaagtcgcgcacgaacgggatcgaatcgaaggtcgacgaaaccttaagcgactcaagcggatcattacggaacacgactgtgattcctttttgttttgagaaaactagtataacgaatccagagagtttaaaatcggagagggtgatttgcagaggtatagtgagcggagtactagaatcgcatatcagcaaatatatctgaaggggagaagtgagactgaagacgtacgcggcagcaagaggtactggcgagccgaaagttggtcgtgtgaggaggaaggtattgagcggatttgcctgaacccgggtcttcaaggtgagaaaagcgtcgccagtgtatgacatcttaaagatgccgcgaaagcgatcctcggccaagtcaccgatttccaaaatttcgagttcggggggaatggatcccaagttcaactcggtgacgtgaatatcgtcgacgattattgggggttttggcgatttattaagggcggcagtgagcagatcttgggcgcgagtgtaaaaactcgcgtccgccatcaaaggcgaccagttgaagttgaacgccatgccctcgcattgagaaagtattaaaaggtattaaaaaggtattaaaaggacattagaatgagactctctatgttgtaggagagggagagaagaggcgggagggcaaaagggaaaaaaaaggcaaaagcgcacatccgaggcgcgtgccccgggacttgggactctttttttattttacttctcttctctttgttttatatatataatatataatatatagtatattattttactactaactatctactcttctacctgtatcaattaattcttcctttttctctttcttttattgtctgtatcgtccattctttcttagtacgtcacaatgtgactttgcaggaaccaattccggtcagccccggcttgatgcccactatagatgatattggaccattcaccgttcagcgttatccggcttatatctagactcttcctttattatctctgactatttcgcgaatctagccctcgagagaaaggggggaaaacacgggataggtggatacacatgcttctgaaagtcatactaataatgtacagaaacacgggggtgcagatcttcaacggtctgagtcccacgttcgtttcatgtacgatgtaagggaaagactccgaaggtccaatatcagagcaatggaagaaaaataaaaattgtatctcttgtagggagtataaaacccgacatcgaccgtagatataccccaggcttgtgggattagcagtctttccccggacgtgtgcctttgttactggacatagacatatccccaaatatttatctccaatgtgcaattgcattctgatttcttatgcttttaatagtcaacaaatcaaacatcagttaaaatatacaacagtccaacagtccaacagtccaatataattccaaaggccaacggcagaatattttttaccgcagcaacaccgcgctaaacctgattaggctaaacgtcaacaccggtcgacgatccagcactccggccccagattgactgtcctgacctcattcggtcgaacagaaccatcctaattccactaccacaggtattccaagccccagattaatatactgggtgtataaaacttccccaatgatgtcgacccggtcacactcgccagtctcaagtcacgcgacaccaatggagcccaaacaatccaaatccaagtcagtggttcaacgcagagtatacgggaaacgaagagccaatgccccccgagcggtattcgaccaaggaagccctgtcaaggacgccagattcaagacccaacgtgtcgaccccgtggaaaacctccaagcgaaactagcccaagtgacaatccatgacgactcaacccctcagtcagacaatcgtgcagagcctacaaagactgagagcgagcagcaccaagagctgacgaaagtcgtctctgatgaatcaaattcgtccgcgacagaggacacctcggacaccccgacaacgccgcaatcctctggtgaatgcaccccggaggagacgaagccaaaatcaacgcgatgcgaaacgacggtggaggtcagagaatgcccaaaggattcagacagtctccccctgattacaccagattccccagctccgacgtcagagtccacaggcgaggatcgagaaaagccaagtacatcttccgacagaaggagagcggaaaaaaggaagattcctgcacccaggcgatcgtccggagtcattcatgacagcaaagctagcgattatgttcgcccaattctggatgaggctttgtctccaattgctgcgcaaggcattcagaagttcagctcatgggcttcgcgatcagcgagcatgttcgacgtcgcaaaactcgcagagggatcctacggtgaagtctacaagcttcacctgcgggaagaagcttgtaggccagtggtctcaaaatcaaagctagctaaactgaaatcatatggcgatggagtcttcaaagtcgtgcctctgcgagcaaagagcggtcccgggtccaaaaaattcaccgccattgacgagattgtttccgaggtcaagatgctcaagtatctagatccaatccctggctttgctcgcttcagagagatccatgttgtccaaggtcgtttcccagagtccttccaaaatgcatgggaccactacaagaagaccaaagatgactgcataaatcctaatccgtccaacaaaagagcatatcccgatacgcagctatgggcgattgtggagatggatgatgcgggatgtgaactagagaagtttgcttggtcatcgattttccagatctatgatattttctggggagttgccatggctctggcccgggcagaggagtatgctatgtttgagcatcgagaccttcacttgggaaatgtttgtatacgatcgacgcgggaagatggttgcatggatccccccacagagctcgacgttgcacgacagccatcgtccagtggatttggaatcagctccctcgagactaccattattgactactcactctctcgcgcggacctgctcttgaccgatgatcccgccggtctcaccgaggttgcgtcatcagatctggacaagaagcagttgttcgatgctattggccaagacgaagacgagattatgcaaagaaacacctaccgatagtatgtttcccaatgcctacttactttcttacacagcttgctaacattgaaaatcagtatgcgcgctacactctatactggttgccccacagaaacagaaaaagtggcggatatccctggcatctgggcagaatactccccacgcaccaacttggtctggctactatttctgcttcagagccttttcaagaaccgcaaacctgaaccaccgcctacacagccacagcgaaaagctcttgcatcttgctcgcccaacaagatgacacggaaaccggagacggccaaagggaaagatcagaacatcgccgaatccctcgtcaaggagaggcagacgaaggacgtgcaaactggtatctcgcagctcaagcaaacattagatcacaggctaaaggccgtcctcgaacttctcgacttggagcatggacatgaagatatgtgttgcgcagcggatttggtggcctacgcgatggactcgcaatggctgggtgaacaagactttttctgatgattccttagtatacaaaaagcattagcagacgggggagtcacatggtgtttgtcattttcaaggttaggagttatcatttgtttacctattgtgggcttggggattggcgttggaatataacatgcaataccttggatagatcaccagtataacggaccttgaatatacactaccttcatacatattctacatacatttttccatgcgaatacatgactctgtctacttgcaccttaacttatgagaataaacacaacttcgtgtttttctttttcaaggaacatcccacagccatcacaaaccgcctatcggcttcccgccaagttgctatgccctctgacagaagagtagttatgtattaggactttttttttctattctagcagaaacgcccacttccaaatccccaaccttttgtaccggggtagtaacccgcggatgactagatgcatgtatgtactgaaaaccccagggaggacgaaacaaacagcctagccgtaaccccgagacaagaagaaagaaaacgccatttcaaagctttcaacaaacgcttttcggacccatgcttttccacagtcgagacaacgatctatcccaactggatgtgcagtaaaaaaggagatattgtcagttcgtttcataaattcgtacacttagagaacagttccagcaccgacacggaagagcttaaccatcagttcaggacggctccagagtgagaaggacttctgatcagtccagttcagagactgaggaagaagctctaggtcgaagttccacaagagcttggcgagcaggagacgcatttcggcgttcgcgaggctgtagatggaatattagcaaacacttccagatatggctcaggtgaaaacacggatggagtgagcaggcagtgatggaatgtgtgcttactgttgaccaagacagttgcgtggaccgtaagagtagggttggaaggcctccttcttgtcattgatgtactcatcagactcgttcagccagcgctctgggacgaatgcctcggggttcttgaagtgcgaggcggcacggaaggcagagtacagcgagatggagacggagacctgtttgtattcaaccgctgtcagtatcgaggcgtggaattgaaattgtgttttgtgctgagatgggaatagccgagggggacctgtcttctctagaacaagttcatgctcggatatttttccgcaaacaacacacaccggcatgttgtaattacctttccagggacgtattgctcgttaatcatcgctcctccttcgggaacgatgcgtggaagcatggaaggaatgggcgggtagatgcgcattgcctcagtcaggacagcattcaggtacgggaggtccccgagggtggacaacttgatgtcagtgtccttgtcaaaagcaccacgaatttcccggaccaagcgtgtgtacttgtcacggtagcgcagaaggtagtatgtcacaccagagagaagggcagcggtagtctcgctgccggccaggacgaagaccgccgagttcgcatccatctcctcaggcgacatgcccttcccatccttggaatgcttaaggatatatgaagtgaagtcgggacgggtagcacccagggcgagacgacgacggaccttctcaacgctcaggttgaagctggcttgacgtttctggagaaggtgcttggggaccaggacacgcaccaaggggacgaggaaagggtagtaccaaaagaccttgaggtaggcgcttgccttgacggcatccagaataattcggacccaccagtggtatgtgctgtttgacaagcagccgaagggttctccaaaagcgagatcgccaatgaggtcgaatgtggtgaagttgaaccagcaggtgatatcaatggtttgggacgcggcgctccccatgaggcccttaagtttttccatgaacatgttggcgtacatctggaggatttcttcctgctcgcgcaaggctttgttggaaaaggcgtgggtcagcaaacggcgcatccgggagtggttatcctcattggctgtgattattgcattaacaccgttgggagtgggtgcatacaaggccgggtccttgacgaagactttttggcccttcttgcggtgaccgtagatatccttccaggcgggtgcggcgcggtaaacgagagcattcggagcaatacggaccacgtctccgtactggtcatggaggcgcttcattgtcgagtgctgcttaccctggatgtcccacatgaggtgaaccaaaggagtgatggcagccagcctgggtccagggtagccactcagagggtggaagcagagagtgtggatgatccagcccacatagtaaacgcacagctgtgaaaaagatattgattggaatgagacacatactcattcaatacttaatcttatacatcagtactcaccaaggcaaggagtccactcagtagaccccagaacgaggggacagctagggcatggcatcggacgcccatagccaaggaatcgaaaatcgtcatgaacaataactagttaccgtaagacatacgaccaaagacatccagagaagttcttcttactgaaagacaaatgtaaaaaacaaatattaaacgagggaacggtgtgtgggaaaagaagagaagagaaaagaagaagagagaggcgaagcacgaaggggaaccggagtgggcaaacgacagatgagatgataagagatttacaatagaaattgattggagacatcaaatggcgggaaactgtttaaggaggtcgtttagggtcccaattgacttgtgtgtgtttaagagcgattgaaaatgcgaaggcgacagccggcaaacttcgacttggagtctcaacttagggctcctcaaacggaaaacaggggctacattaaaggactcaatgggtcagctaacaaaggagtactcacgcggagatcaagtaacggaagaattttcatggctcatcattcgttatatctgagtctactggatgagcgaaatatgccaccaaaatcaaccactggcaacagagaaactcaacaagctcccagcagccagtccaccgacaagaaccaggctcatgaatccgccagcagccggtctttcgtcggcaacaacccagtgactagcgcccatcatacagcttgtccccaggtacccattggtggcaccgaagaagaactgtacaaggaaatagaaaacgtcactcttgacagcagcaccttcgccgttgatgttgcagagctggtacatcggaatgaaaataacacgggcaatagccacaatggcagccatctgaggatgctgtcccaaagacactcctgggatagccacacacattctcccggccaaatcgcccagattccaaagcaaaaatgcgaaaggaacgaagacactaggatcgtacatccgtgaactggcagggtcgttgacggacttgatctcggccgtatagactgggaacaccatagaaaccaaaaagcagacgaacacagcaaatgccagaaaccgcagcttaacgaacagagtccagaggctgacagtcttggaatgttcgcggacatccgcaatagactcatcgtcatcccttgccaacttttgcctcgaagagggttgctgtctcagaagatagaggaaagccaacagggcaatgaccgagacacccgtagacgtaagaaaatatataaacgcagacgtcgacgaactcgtctggggcatgctggggtcttggtctcgaccttggtctcgaccgacgctatcctccttcggcggcacagccagcacagagaagatctgaacaatgcaaggcaacacaccggcaacaccctgtccacccataatagcctgggtatattcctctctaccgaacccggagacgtatgcaaagacgccattctggttgataccagtggccagactcgcggcgcacaccatcaccatcaagaaaccaaagtacgctcgcggcgaggaatcggtcatgactactgctgagaaggccaaaatagtgaacacaacagagttcagcaacagcgaaaacgttattcgccgtggataggaggcgttcttctgtagctttgctagggcataggcggctccgaggttggtgacggttgacatggactggatcgacggttggtagtgtagtcttgtccagtcatcggactggaaccggctgtagaaatatggtgccgcggcgaggaacatgttcctagatcgtgctccgcattagtttcggttggctcaactcacacatgtatgtagcttgttcctccgggttcggagattgttgagttccacttaccaggcccacaacatagacactccgaggaggaagaatatgccatactgtaatcttgaaaagtgagactgcagctgtcgctgcgtatatgttgtctcatcggtgtcgtctgcagcggagtcctgcagtcgttcgtacgccgccggacgggcgatgagactacgtatgcggttcatgtctgtcttttcaaccccacttcctatgtaaaagtaaaatattctgtaaaaataaggggattatctcatatcaaagagctgtaatgcgccgtttgacgttggcatatgactggttactaagcaagatacgtcgcccaggcggccgcgggaccacccgcacgggactccgggacaggcgatctatgagttctcctgtgagagcccatctgcgactgccatagcttgtgttgtacatttggggtctggacaaggttgtagagcggtgccccgaacaaacaatgaaacaataatattgatatcgagatttgtacacagtaattgctgacttagtatctatcgcaaaatctaacatgcaaaatgtgcgggagtatgagaagagaggaagagtgagaggtgagtgtagatgagggaacatgtattccaaggagaaaaaatcaacaagaatgaaaagacatcgtaaggagatggccgtgtaacggtagggtcaggagtaaacaaggtgtggaatacgatcactccttcttcgaagaggctgtctcctctacctcttctacgtcatcttcctccagctcaggctctaactcctccttctggaactcccagagctgatctgtctccatagacttgaccggaggtggcgttgtttcgccaccactcatttgccattccatgagcttcgtaaaggcgccatccgggtgagagctgagctcctcgtaggagccttgctcggcgaccttgccgtcagggccaaggacaatgatggtgtcggagcgcttgatggtggaaagacggtgggcaatgctgattgtcgtgttgttgccgcgaagcagagcggccaacgcactgttgacgagagtctcggattcggcgtcgagggccgaagtggcttcatccagaatcagaatgtcaggttccttgataagggcacgcgcaatggcaatgcgctgcttctgaccgccagacaactgggctccacgggctccaacgtgagtatcgagtccatcaggctgtactaggttagctaggttcgccaaaataatagctggttggcggacttacgaagtcgctgatgaattggcaattggccttgcgcgcagcagcaatgatctccgatcgtgttgcttgaggaatgccgtaagcgatgttctcggcgattgttccagagaagagcacaggctcttgggaaacaacgccaatctttctgcgaagggacttggcgttcatgcccttgatatctttcccgttgatcaagacccggccctcggtggggttatagaaccggagcaaaatggatgcaatggtagatttgcctccaccggatggtccaacgatcgcaacgttagttccttgaggaatctcgaagttcaattcctggaagatcttcacagcggggcgggtagggtagcagaacgtgacgttctcaaatcgaatgggtccacgcgcggtctcgaccttgagacccttggttgggtgaatcgtgggctcacgatcttgcagttcaaagagtcgactcgccgcacccacacctttcatcagctctgaatagaagctggagagaccgaacatgctggagcctgcataagcagtgtacattaaaaacgaagtcaattctccaatgctgatagcacccgattgaaccatcccaccgccgacataaagcagggtcaagatcgtcatgttgcccatcaagccagtctaggaagaagtcagtcaaaatcaataagaagccagaaagaatcaagactttcgactcaccgagctgaagaaggttgcgctaataagagactcttttttgccaagctcgaatattttgcgaacttgtttgttgtaccggttgacttcgataacttcaccggcaaacgactgactagtcttgacgttgcccaggcgctcttccgcaatcttagtcaacgatcccaggttcttttgcattttgcgactgatgttcctaatggctcgaccgtaaaagagagcgccgagaccaattggaggaagcaacacaagcaagatagtagacagctttgcactagtataggccatcagactgaaaccagctgcaccgctaacagcagctcgtagaccatcggacaggttctgcgtgatactcttgccaacaatgatagtgtcggagctaaggcgcgagatcagatcaccaacccggttggcatcaaagaactcggcatcctgcacgaaggtttgacggaaaagcttggaacgcagcctagcaacaattcgctcaccaacaattcgaagaatgatgatgcgcccatagtttgcaccagcacccagaagtagaattccaccgagagcagtgtaaaacatgggcatgctcaagccgaacagttcgccccctccttcggttacgctcttggtggcagagtccatgattttaccaatggagaagggaactgccattgtgattgaagaggagattaggaggaaaaagaaggcgaaaccaagggccttggattcagggcgcgcgatcttcaaaagccgccagatttcggagaatccggatttctttcccgatgcgccgtccttggccaacctggcgctcatgttgacctgcgctgcctgcgctgctcgctcagacaattcgaagcccttgtcctcctccacttcttcttttagttctggagctgaccgggtagttggcactgtggaggatgcggatggtttcgcttggaaaagttgggaagttgaacataaaaagcatgcttgggagacaatgcgagacgtagaaggggtatatttgaagctgttgttttgaagcaagagtgggttcgcaccatcccggagtgtacccgaggcggttgaatagagacggttcaacccattgtggtcggcggaagagataataggcggtctcgctttaggaagtaggtcgcgagtaaaggagctatatggtctcaaagcctgccgtgggctgacacccaaggccagagacacaggcagcctggcactgcgcatatcggagtcggatcggacaaggatcgaaacggaattggagttacaatgatgtcaccgaataagacgtcgacatgccatatctaaagggaaaaagttcaagttgagcacatcacatggcacacattcagctccttggaacgtgcaatggactaggagcggatgtgtctggagcttcgtccgacgcccacggtcatcggcaaagcggttttcggggccggttttgccttagtcgaccgctcgtgattttgcccgtgcttaccgcccatggaagccggtcgagagctctagatacttcatctgtcctgggccagaagcttcatttctttcgagtttcactaggttgaaacgcttcaaaaatatatcggtaaatttgctgaattgtcatttgcatcaggatcgtcaaaaacttttgttcctcccctgtttcctctgccgctgatacaccaccccacctctactcctgcacactcactgtcagacaagatggtgcttgactacagcaaatgggacgccttggagctgtcagatgactcggatatcgaagttcatcccaatgtcgacaaacgctcttttatccgagcaaagcaagcccagattcaccagcaacgagagcagcgtcgtcatgaaatcaaaaccttgaagtacgagcgcataattaatgatggattgttgtcacgcatcgacaagcttcttgagtctctgaagaagcacgaagactcgtctgcatcccccgacgagttcattttcactacaatcatggagttcgccagcaatcccgccgaagatcaagcccccaccccgccggaaggagtatacacacacgagccggaacaacccaagttttcccagatgatgagctcactggtggaccaggtgaaaaaggaaattggcgattctaagcctgagaacctcttcaaggcatacatccagggtgtgaatggacacttggaaaagattcaagcacttcaaaaggaattgttcgcaaagcttgcgcaacttgagaaggaggaaggctccaagatcaccagcgataagctacatgaaggtttcaatcaatcgcatgtggccaggattgctgagaaggagaaggcggctgccaaagcaaaggagagctctgttgaactcctgaaccctggtgcaggaagctccgccgccaaggccgatgatgaaggcgatgatgaagatcctgccgatgtcgagattagcccgctagcgaagaagtttgctcagctcaagcctggagactacaaggcctatctacagttcatctcagcgaacccggaaattgtcgccgagaaagagactgatggtctactcgttgaggcgttcaacagtcagctcaagggtcaagatgactatgctcgccagtgcgtgcaccaaggtcttcttctgcaatactgccgttcgcttggtcgtgacggtatccagctgttcttcactcggtatgccaatcttctgcccgtatttcattttctcttcttcagtcaatggctaacatataaccttctagcatcaccactaaagatcaccgcgcatcaaccctgttccttaatgatgtcaatgaaacttacgctcgtatcaaatcccgctccgctgaacttagcaaggacggctcagcgtccaacgatcatgcgggcgtagagcaaatccagctgcacgccgttgaccccaacaccaagataaccatcaaccttcccggcgccaacagcgaagaccccgttgagattgaggcacgcaagatcttcgacgctttccctgaagacctgcaaaaggcactggcaaccgagtccttggacgaagtcaacaaggttctcggcaagatgtccgttgatgaggcagaggtcgttgtggagcaattgggcaatggtggtatgctcagcttggaggaagggattgtggatgcgacgacagctgagggccagaagaaattgaaggagttggaagacgaggggaagcaggaagtgggtgagcccggtggcgacgttaccgagcttgactaaggatatgcaaaaagcgatgatgatatgaattgagtatgcatttatttatttctcttaatccgagaacaggttagcaactactcccaatattatcgtacatttgtaactttccattcatcagagctaatcggccggcgaaggaaatccgtggtattaacgatgctatcaatttgagtgagatactaatttacaaacccccctaagagacttcgctgcgttgagtaaaataaaataaagagaacaattgacgtagcggcctgatcacggccaggctaccaaataatgcggggagggggatgtagaaaaagccatatcatatgagtaaatgtgggaaacttgtgaataccacgtcttaaccccggactcccgaatcttctatcccccacgcgccaaagcaaaccacctatattccgctggagccgggagcctcctggtcttttcggaggtcgatcaacaattcacggaaacgctccttgccggagccgctggcaccgcccgcggagcccttgcccgatacatcaaccagcttagcaatgcgctcccagctagtgccacccgcagaggtatcctcccggttcgcgaggaactgttcggcctcggcgcgggcgtgggagcggttcttatcggccttgttgttgtaggaaacgtagaagtcgtcaatatcctcttgtgccttcttgacggtactggccttcttctcggcggagacctctgcacggcgggcgatctcagaatcacgcttctcgcgccattcactgaggatggaaaaacagacgttagcttgggaaccagagccgaaacaagatgaatgcaaatcgcaaaggcaatgcgccccgtcattcagagcctgagatccaactcaccgaacagcatctccctcatcctcaggttcctgcgcgctctggtatccggtgcgggggaaaggtgagccggagccagtgattgtgccaccgggagcaacgcgctgcatagatgtaacccctggtcagcatactgtatgttcaccacaatgtatccaatagccaattcatacctcattctggttctgtgtcgcaacggaggggaaggatgattcaaattggccaatttcctcaatgggctcatcacctccgccgagaaggtcgtcatccatcgtgcctacattggcgccggcaacgtggtcttgagaagtagcgaattgctcggcatcttcaccgagcgcggcacgctcacgggcaaggaaatcatcatcggtggtggcttggacgtcagctacttcggtttggcctaaatgcgggtcatgttagctccggtgtaaggagagcaagtaaggtgggttgagcataccctcagagaagtcctctagggaagggaaacggtcagccatgctgggaatggattgtacttgactgttgtatgattcaataaagacgtttgaatcaaggagatggtcttgagaagaagtaatcaaagggtcaggaagttgattgttataggaagcagtgttgacaggtgtggccggggcgggctcggaggcccgttgttctgccggttccggggcggtaagcttatccatgtttcaagctttggggtacagaccacttcaacttcacttgtggtgaagaagattgagagttgagatcttcgtttgatatcccttttgctttgttctggtggcttttcttgattgcaacttagctgcagttttaaatcccaccggtgatcttcaatcgctcctcgtttcctatttgctttcacagtgattgcgacttgcacttcagatccgataatttcacttctcaagagcttgctgcttaattcaagtgcttactatttctatcattatggcttttactgatgacgctgtcaaagcaaagctatcagctctgaacgacacgcaggagagcatcgttactgttgcgcaatgggtcatgttccacaggtacagacgcttactccaatctcaaagagacttgctaatttttgactgtaaatttagacgccatgctgaacggactggacaaatttggcttcaaaagattcgcgaatcgccgcctcccaagcgactcaacttgatctacctagctaatggtatacatatcctcccacacccgagctccgctctgcttgctgatcatatacacagaggttgcccagcaatcgaaagtacgcggaaaacatgatttccttattgcgttatccccagtccgtctccctaccggtccggcattgcaactcaaactaacagaacaatagataattgtcgacgctacgtcagcggcttacaagggttcgccgggtgaatatcaacaaaggatccgccgggtcgtggaggtctggagacaacgcagtgtattcgatggtcctattttggatgcagtggaagctcgtatagacggtaggtcggatcaatacgcacgagtgactagccaaactgatcatgttacagaactcgacaaagctcgtcccacaaacaagaaacaaaccctcggaggatctttcttcaaggacacttcttcgggatccaccccgtccgaactacagcctctcaacccattgcaggttactctcaacaaggctgtcatcaactccaccaactccgccacaagcgctacttcggagttcaataagcttcacgactccaagacaccgaagcctacgctgcctgtacacgccgcgcgtctaagttcactcttgaagacgcttgccaacgcagaaaactccgtctctgaggtaatcaagtcgcgccgcgccttgatcgatgggcttgagaagattctccagaccaaccgtgcggagctatcgaaggaggaaggccttagcaccgagatcgcgcagaagaaagcctcagtcgataccgagaagcgcgaagtcgaagatgcgattatgcgcggtctacccagcgaagagtcctctacaaaccccggcgaacacagcggacacggtgatgcatccgtccgcccagaagtcgaagctctgacacctcccccggtggaagctattacgccggtggggtccccacagccagaaaagcagcagcttcgccgcggcccgtttacggaagaggcggacgaggacacttcagaatggaaccccatgaacatccccgatatgcagcagtcaggcaacgggtctaccatcattgataagcccactaccacttcttcgagtcatggcaatgactttaatgtcgctgccgatggtcatgcaaagaggcgcaagatctcgcatggcgaggaggactatgcggcttttgcggccggcgagctagatgctgatgttgccgatctgcttgccactcaggcaaacagtaagtgagcttgaagcataatggtcgaggccagattttaccttggtggtttatgtgcgtcggcttctcttgttttggtgtgatttattcatttctttcttattctatcgatttcttcttgggcattatttcggtttatgctagatatcatacttttgtgtatgaagtaactaaatgtatgagttggaccatgtaatatatggcatttatcagactcgtagtccgattctctccggattttctccgtgccagtgtcttgcatggtgtctagtgtctccatatacatcgtgtttacgtgcctatttgcttgcgactagaactaagcaatacagcaactatcgatatgcaacggggatgtctgctcttctcgtcacattaactatgaacccattctatttgcaaaagaaatgtcatcggaatatatccggatccatccaccgatctcgcgcgaagcggttcgacaactgatgccttcgcccccggtaagacaacacagagcggatattgtttgaagattcatcttctggaggtggtggcggctttgaactgccccccttcggtttcacgaccagtaaaatgatcatacccaccacgacaaggagaagtaatagcatgatcttacgcttagtggttcgttgttgataacccgtagcctatatgagtcagtttctcattctagcgacattgaatgaaaagaaaagaaaagaaaggtaacataccactttcagctccttgtccgcagccttcacctcggtgcccattcgctcgacgttgtaatctatacggtctaacatggttccttggtcgataatcatggtctgcagttcacggaaaatatccgagagttcaataatgccctttgcgatatcgttgatctcgcgctcccgctgcgcaatagcagcatcattctgaccggtctgccgttgcgaagtctcctgcaacatcgtctgcgaaaaggacctgtcggcatctgactccatcatcgacggatccgtgtatgggttctgggcctgcgtaggcgcgccgtcgaacggcgtcgcgataccctcgagatctcgcaattctgcacagaaacaaatcatcgcattagcatatttgaaccaaccgattccgcctgtgccacggaaagagaacaacaagaacgaaacaaaaagaaagaagtggtcccatactccgtaaataagtactttgcttcttcctaaacctagcactggcctcctgcaccctcgcagcaagcgaaatctgaatatttttcgccatagtctcctccccactcgtaacaccaccatgcgccttagactcgccgaccatagtctcgatgcgcatgatagagcgctggcaatcatgaaaggagcgcgtgacatcctgcgtcaagctctcgataacgccctcgtcctgcctgcgcagctcctcgtcgccgaagccggggagaaggtgtttctggtgtagcttgtcgagctgggcggagttctgggcgatctcggacaacagctcggagacctcttcctgcacgtccacccagcgcggcgggaggaggtccatctcgatgaccatgtcgccatcttcgtccgtttcgggtattaggcgcctgttttcctccgggtgcgagggtgtgtcggagaagccatttgttggtgtgaagtgtggctttttggctgggtggtggatgagggattggcggtaggagaagtagctatgtttggaggtggagtgttagttgttgttatgatttgtaggttggtcttgtgggtggtgtttcttttcttttctggctctttcccggcgctgacgggttgcgcttggggtagggtagggtatatggggttgcatacaggttggttcgatcccgccacattgtgagggcgtccggaggatcgagttgtgtggctgatttattagtttgttgaggttataggaatcatgatcaggtgggagtgttaggctgggattgaatggtttagagtctcgatgtagccagaagttgataggagctctccacatgtcggaaggggtcacgtatggtattcatcatgtaatatgtggttttgtccacgtggaatgtggtaattttggtatggctgggtaagatctaaagacagcttgatttgcacatattctctactataaatataccgatgtctctctcatgccagcccctaggtagcttcaaatggcttactatatggctcgtgtgctttaactaaaagtggcattgacagtggacccccggattttcgagcacaatatggcccaaataggtaactatatgcatccatggatgttctcaaggtaatgcaaattcgaagactaatagactggagaataaccgaacaactatgtttcattgatatagggtattataatatgtcttatagtcagcttggttccaggcctataaatacacccgcaggtctacaccctacaaagtactagatatagccttggaaaagagatccaagataaaacacaagccaagaccttcctaatgcaattagagcaatcaaatcccattgtctattctggtatagtatcactgttagctcgatcataatagccctgggccacgggatcaagctttcttgtccggcgttacatccacatcatacaagatgaggaaggaaatatataagatagtacttttcaaaagattgaaaaggtatatccacatgtacagagtagatctaatgagatatcaagagataacagaagaaaaaagaaataccaatgcatatgcccagccagtggcaacattcagccccaggagagtcccaccgccctgagacgaaacgacgctgactgggcacctcagacacgctattttggttactctcgtaaggctgctccccttaaccctcttcttcatttgacccctccttactttgttgtattttccacctacattcatcatggtatgtccatgatccccctgacttatcagttgtgttgtcgaaaataatcgacaacaaaaccccccacattgcggggcatcgtccctgctgaacctccctgaccatcgtattctctaggccgattccctcaccgaagagcaagtttctgagtacaaggaggccttctccctgtttgtgagtgaccacacacacacattgaagatgtgatcatcgaatacatgctgaccggggtttgttttgttgcgaaataggacaaggatggcgatggtacgtgtggtcgcgcccgacacagcttagtcgagcccacagcagggtcctcggcgatggaatctcgagagaaaagaaaacattctaacatgcaatcctacgaatagggcaaatcaccaccaaggaacttggcacagtcatgcgctcgctgggtcagaacccctccgagtccgaattgcaggatatgatcaacgaggttgatgccgacaacaacggcactattgacttccccggtacttcaccataatctactggtataaacgagagacggctactgacgtgcggtagaattccttacaatgatggctcgtaagatgaaggataccgattccgaggaggagatccgcgaggcattcaaggtcttcgatcgcgataacaacgggttcatttccgccgccgagcttcgccacgtcatgacttccatcggcgagaagctgaccgacgacgaggtggacgagatgatccgcgaggcggaccaggatggtgatggccggatcgactgtatgttttggaaacaatcttggagcctacgggcacttgcctccccaaatgctaacctctccgtctccatatagacaacgagttcgttcagctcatgatgcaaaaataaacgccgcgttcccaccgtgcgcctttttcaatgttagctgacgtcgcggttttttaacgagaatgtttctcttccatttcaattttccaataccgatttcctgtagtctatactcactaggctatacattttggatgatttacgatcaagcgtgtgctttgaaatgcagacggagtggactgggcggtacattgggtcaagtgttcataatataggaatgatggctctctccctctccctataattctgatggtactgggctttcaacatcaccctgtgccaaccaaccatgtccatgtccacgaaataccgtagcaagcgtataagaagtaacctaaccattcatccataccaaagcccaccatttaagcatacagctatcgattaaacctcaaaacctccataaactgcctcgcaacatctgccccagaccacggatcagggtcatcctcagcacgctcaccaaagccagtcctatcaaccttagtatcagccccagacccagccttcttccacctcctcaaccgatccttgacctccctcccaacattcgggataagaatcgcctcccgagcctcaacacccaacctcccccaaaactcccgaatcagcgatgcagtagccgcatactcagcatcgatatccgactcttcaatcgcagagctagcgaggtcaatacctgcgacttcaacgtccacatcacaaccaccgccagcaccaacatcaaacgatccatcctcccgatccacaggaatggcctccacaaccgacggaccacgccactcaatctcaacaactgtgccacgcacacgcgccgtcgggaacgtctgtcgcacgtcaccaagacgcacgcggaagtcaccaacctcatagacgatcccgttcgggacagctagcgtgaaccggtggttccagaagggctggcaagcgtaggtgaagtgctggaagagggtcccatatgacgaaggggggatagtcgtcataaccattggcggggtggaggagtgatctggcgcgatggcatttacagggccgcgcgcgccttggttttgattctggtttggtgctgggatgggcttctctggctccgaggtgtagatgaaaccgtgggctgggtagtgggttaatgagagaaattgcatgtagcgtgggtttgagggtttcttgtttgagtttgaagaggggagtaggccttgggtgtcgcggaggagcttttgctcgaggccccagcggccgattggagttagttcttcatttgggaaagcggcgcggaggcgctctgtaattacttggagggctgttgaggcgtttgggtttgaggggatgaagtagacacttagttgggttagtttgggggtttgtgttggatttgaagaggggatttacccagtgataggcatttttatgtttgttttcttcttatattctgggcaggtgcagaagagatggaactgatgatcacagcagtgttgagctgagagatatcgattggggaactgatgtgttgagaagatggcggtgatcagcccctagacagtcttcagtcctactagaggattgattcaagagatctgtagcaggtagcgaccatgcaatatagatatagagattgatcaataagaatgatgatcaagtccagtgccagaaggaatgacaaaggacgattcctaaacaggaagggagctttgcaatctatatagcttgattagtataaacactgattgtgagaagaatccgttacctttggacaatttctatgtatatgagattgttctggaggatcaagtggtcaccagatgaaagcccacgatataacactggagtgcaaacagagcaaacatcttaacacttcaactgtctggaaaccaaatctttttcttgcaacgataattgcccttttgttatattcatttccctttctattacatggtattgcaattagagaattcagatattcagaatgctgcttcctttcccccctctttagcccgcaaagagattgatatggctcgaaagtgcccgaggtcagccttgcggtcacattcagctcagcttctcgacttcttgatactagtccctttgactccactcccaaagcacaaaatggtgcatatgaacggcttcctatcgatgtgacatgaagacacaagcaggctttcagacttgcaacttgttactgcttcccgatcttcatctaaatatcgacaagatcaacacctactccatcagagagagtcaggggccgcagtggggttggtggcgccctcagacagagtacagcttagaggcacagaagagcctcttggcgcttttatcacaagtctagacttgaccattgatacactaataataacattatgttgtttggaccctgcggatttccctgattgcgtggcccggtgttgaagggggcacattctcaaatttgcgccaatcatcgtccgacgctctgcaacatcatgccttgcaccaaatcgacagccacaaggacgatcaatggagctccaaagaactcggccgtgtctgactccttgagacctctcacaatccatgacgtgccacattgtgtaaaactgtgtccatttcctcttttgcttgttctaactgtcgcgaatcttattctcctggagacgccaatgtcggcctttgctactagtccctacacttgacaattgacttgtacaccattcaactccttctctgggcttcctacgactatttccttttttttttttttttttttccttttttttggttattttggcacgcccctactgcattcatttattatgtataacaagcgcaaaaaccgacctttatcaacagcattgtttgtgattatcgcgacatacattttcttcttctggctccctagtacaaaaacatatcgaggtcgcctagcaaagccagtctccagaaaagacagcaccgttcggcaagatgctattcgtctagataaagtcaccgagcgatttcccgttacagagtacatcccattgccaacaagcccagctaatattccccgcatccagcataacttccccgaagaaacgcgcggcgagcgcaatgccagactcaagaagcgggatgctgtgaaggaggcttttcttcattcatggaatggatataaggaccatgcgtggatgcgggacgaggtgaaaccccgcactggaggataccaggataccttcaatggctggggtgccactcttgtcgattcgctagatgcgcttgtgatcatggggctagacgatgagttgcaactggccctggaggctctggaggaaatcgatttcacgacgactaagagcagacatgtgcctgtctttgagatcatcattcgctatatgggtggttttattgctgctcatgacctgaccgagggcaaacatcctatcctgctgagaaaggctgtcgaactgggcgagatgatcttcaatgcgtttgatacgcataatcgcatgccccaggtacgctgggagtggactaggtacgccacaatattaaagaatatgcaacgatattcgggactgacaatacccagatccgcccaaggcaaagaaatcacaccatcctcacgcacgagcttagcagaaatgggctccttgacaatggagttcactcgcttgacccaattgaccggtgatcccaagtactacgacgccgtgcagcgaattatgaacgagctcgagatcggacaagacaagacccggatgccgggcatgtggccgacatggattgacaccgaccgaatgacgttcgacgactccgagttcactattggcggatgtgccgattcggcatacgagtacttgcccaaagaacacattctcctgggcgcacagacagacaaatatcaccgcatgtacgaaaaggccattgaaacattcaacgagaatctactgttcaggggaatgacccaggacgaggaccaacacgttctcttcacagctaacgttgttgcaatgcggggtgactcgaagaccttccagtatgcgcctgatcacctcaagtgcttcatgggcggcactgtggctattggggccaaggtcttcaatcgaccggaggatatgtatgttgcccggggacttaccgacggctgtgtctgggcatatgatgttatgcctacagggattatgccggaagtgttcaaggtcagtccttgtaagcacattgacgagtgtccgtgggatgaagagcagtggatgtcagatgtcatatcgcgctctatcagtaccgaggaggaccgcgagaaagcggaggaccatattgaggctgagcatttgccgcctggcgttactagtgttcgagacgcatcgtataagctcaggtacggtttcatctcattccttctgctgcactttactaacatactacccttctagacctgaagctcttgaatctctgttcgtcatgtaccggattactggagataagactcttcaggactccgcgtggcgcatgtttaagaacattgataaggcaacccggactaagtttggccattcgtctatcaacgatgtgcgtcattcgaaaccaaaacatcaggacaaaatggagagcttttggcttgccgagactttgaaatacctctaccttatcttttctgagccagatcatatcagtctggacgactatgtgctgtatgtttgctccccagctgtgtttatcctatatgaacgagctaataattctcttttcaggagcacggaagcccatcctttcaagcgaccaagcaactgaagcgttataatattgggatacagctttcatcaccagcataatattggtttgactcgacaggaccggcgttacaggcattagggttttcaatatcatatacagcatctatttcttccccatctaccagagcaaaggatgcatccctggagccctatcccatatcctacatccacacatgacaccagaagccttaatataaaacaaaaattatacataagcacagacatcaacagaattaatcttcaaatcctcccgcctcctcacctccgcctcatcttcatattgaatcgagtaccgaatctccttatgaataaccatcttatcaggcccctccccatcatccactcgctcagtcgcaccactcgcatgccggttatgcggcctcggtacaagctcgatcaaatcagattctgtcgcaaatgaacccacagacccagccctcgcgccattcttccccttctcctgtacctgaaagcccagatttttgcgcggtgcgctgagcgggaacatcgaccgacgtacaggctcacgcaccgtatccgatctgccactcttcgcatcctttcggtttttcccaagcgctccgtgcgcacggggactggtatcaacacacaacgaagggtccaggcgggggcgctgattctccgactgttgcagcccagagctagaaccagggccactaacggccggagtaactagcggtggctttgaacctgtcccggctcttttcctctgtatgcgggactgcgacatggacctcgaagcggtattcgaattcgagccggacccggacccagacccggtcttcgagctttctttcgtaccgtttgatctcgacgcgctattctctagcgtcgagtcgcccgctgtaccgtagtttgtgctgacggctgccatgaaaggtcggagacagaatacgctgcatgcgactagggcgtagtgaagctcgacttgcatccagattgttggtttgacggcggcgagggttgtgtctttgttgtttagggctgcgtggagggatgagatgtggattagggagaaaattatgagactggcattttgcggttagccttggggttgagattggggatgcgtgttttactcacggaaagcgaaatataaatgcaaatccgacggctaatttgcggcgaacggacataaacagaccttttaggaggatcacggcgagaaggaagaggaggagctcggttataacgtcgactgcggcgatgaattgccatcgtatgtactacacttgcgagattagagacggcctcagggaagtcgatgcatatagtatatcattggtggtttcacataccaagtcgctgcattcgccgccgtcactccgccaaggtgtgtttagctcacagttgactaagacgatgaatatagccgggattacccaggcagtgcacagagctagtgtcgcccaggatgcacggttatgtggtttctgcggtgtgaggcggaggtagatagccacgacgcagcatttggagaggtagatgattatgagagcgatgatatcgcttgttgcaattaacttaggtagctgctcagtttgggtccatgcaaacaagataatagaatatcaaatagcgacttacagcttggatctgatcgagtcgaccatccttcaataacgatatagaagtcccgaacccgcgcgagcaggcatagaagacgagacttgattgcaccacggcgacagcctgtacagcaatcaataatacatgttagcagtgtactaaggtaactcatccggcccaaatttgactcgaattttcgaggcaactcaccgtagcacccaacaaaacccaatcatcgcgcgcaaacggcggtatcagcatgagccgcacatataaccgaattaagaaacacaccaaggacacaaccagtcccagtgcagcagtgataattacccacgcgccatggtgcaagtcatcgacaacctcaaagggcggcgactggcctggcggcacatacgggcccatgacaggggaagggagcaaaagccaccgcaaacgacggagtctaaacaagtacccttctcgttgttatggtgtatatcatgtggaaggatgggtataatgtggtgctatgtggaatgtatatatgggccgcggtgatcaacacagacacagaaacgactgtgaaaggctgtcagatccgggagccatgtggctggatggcgtggtgagaataagttaaagaaagggtttatttgagacgcttgtatacgatagaaaaacaggagtaggagatatgcgggtcaaggagaggcgataacgaccgagctaggttccgtttctcctacgattcgcttgcgattgcgattatttctgtcttgggagaccatatgctgatatccgatacgaaacatggattatcgagtccagacatgtacgtaagtacggagtagggctggtggggttcgcccgatatgggcagatatgttggaagggggattcgaatttgcatggccggtttatccctttcttcttgaagggtataagcggtcattattttcggtgtaagttcaggttgtctggttggaatggtgattgacctctctccctcacgtcgaacttcgacgtagtacggagtactccgtactgtggacatgctactttagggcaaggcgggcccgctgtagggtcgtcgatcagcgtgcgcccttgaaaattatgctgtgggtctttgggggggttcgcatcctataggctgtgggatttgtttttggacgaataaagcgaggggcttatgcattcacccgttatttggatggaggcaagcatggagtgtggcggaattgtctgggggataagcaacgaggggatgtgggacagggattgatagagagttagaaagttagcgcaattgatgcatcagaaatgtaacgggtagtggcgccgagtctattcaaggggtcaggttttgtttatatttcgtacttggtgtgttgttttattattttgttgggtgcgctctttaaagaaacaagtcatggtttatacaactacgacggactagaaggatttagagtagcattacaaccccaatagtcagtctgaattccaatatctcccaagtttaacgacattaaatggacaaaccccctgtggcatgcaaggtgccatcacgccccattccgggcaagggactagggatagcaaactgcaaaaatgagtcccgagagtcacattcccaattggattcgatgcagcacccttgagtaaagaacgatgtatcattcggatcgttgcttgggtgttccgaggaggccttctctcccacatggcgtgtgagaattattcacaggccatgccttgcgcccacgtcaataccacgcttcggtcccggcaattcagtggccatcatgattccagtcctttgggtcttctcctgataactgccttttctggctacagccatttctgttagctttattagaggttgctttgatcgttcggcgcttttatacttcgcatcctacatccttcagggtgtcgagttgccaggggatatagactttcttttctattctcgcaatccccttttttttcgcggagaattttgttgtctcatcctgaatagatttttccaatctagtcattcagacacacacgcgatcatgacggtcttcagcaggtccagacctgactcgcagcagacgatgactggtcttgacgacgaggagtatgctcaaaaaggccttgttgagccgcgttatatgggcacgttggcggatcgtcgtgatatgaatgctcttggtcgagtccaggttctgcgagtaagttgctctgctcttgtcatggcggttgtggcggtcttgctaacattaggaagagaaactttcggtttatctctattgttggatttggatgcactttgatctgcacatgggaagttatcttgacgtacgtgccagtccctgcatatggtgatcatgcagacctctgactccattaatagattgctggcggctggcttgaccgacggcggtacagcgggcttgatatgggggttcatcggcgtctcatgcggatttacccttgtctatgccagcattgctgagatggcctcgatgtatgtgactgacggcatgctgtccctggctggatccccgctaatcagtcgacaaatagggcccccactgccggtggacagtatcattgggtgtcggagttcgcaccaaggagaggacaaaagtacctcagctatatcacaggtaatacagttgacatagctagtccttgtgtaagtctagctagctaatgtattatcttaggatggctttctgcaatgggttggcaatgcgctattgtgtccatcgcctaccttgctggcacaatcattcaaggcctgatcgtcttgaaccggccagattatgacttccagcgatggcatggcaccatgctagtaattgccatctcgacattctcgatcttgttcaacaccttcctagccaagaatcttcccttcgtggaaggattgatcttgattatccatgttattggcctgttcgccatcatcatcccgttatgggtactcgcaccgcgggataatgcccacgcagtgttcaccacgttcaacaacgggggtggctggaacaatgctgggacggcaacattagtcggtttgtctactaccataacctccatgcttggttacgattgctcggttcatatgtgtaagaaagagccctatgaacgacctcagacctggtatattgtgctgatattcaaaagccgaagaaatcaaagacgcatcagagacactcccaaaggcaatgatgtcctctgtcgccgtcaatggtgtgctaggattcatcatgctagtcacattgtgcttcacactaggcgaggtcgacaaaatcctggatacaccgacgggattcccattcatccagatattctacaacaccacaggtagcatcgccgcgacaaacgccatgaccgctgtgctagtggtgaccctgacagctagcacaatcaccgaggtggcgacggcatcacgccagctctggtcgtttgcacgggacgaggggctgcccttttcgtccttttttgcatatgtaagtccccgatttaatccctgtgtggcatctgaaacaagatgtgtagattcagccatattaatccgtaaccactaggtcacacccggctggaacatccccctcaactccgtgatggtgtctctagtcatcacagtgctactatcgatgattaacatcgggtcggaggtcgccctgaacgccgttatctcgctcacgatcacatctttattgtccgcgtacatcatctcgatcgggtgcgtatttctaaaacgcattcgtggcgagccgctcccgcaccaccggtggtcgcttggaaaatttggcatggcagtgaatatcggggcattggcgttcctctgtccgatttttgtcttcgcgttctttcccctgtcgacggatgttacggttgaaacgatgaactggagcgtggcgatgtatgttggcatcgttggatccgcgacgatttactatttggtttgggggagacatcattttattccgcctgtggctttggttcagcgggatgaaaatagttgaggattgcctctggctcgaagggtttgtcgtttcttctctctctctccctttttcttttctttttttttttttttcctgttattattttcctgtctatgtttgactgcattgtgtattttgtattttgatgacgtgatgatgtgacatactcggtgtataggtataatgttgagattctgctgctattatttatttgagtatcactattttgtccttttcaaacaggactccctactccgtacattgtacaataatgacgtggcctcacccctattagtggtgatagttactcgatttagagacttctaagcacaaaggctcgaccattcagctggccatcggcactgaaatttaagttatcagatagaactgtttcttcctcctatgacacaagcgcttcatgacctctgctactccgtgcgccaaaacctaagcttcttgttcggtctaacgaagatggtggatcagcaacacctaaaatgcagggccattgataaatagagatctagtgcacaagaaaagcccggagatgagctataagtggaggagccagcctcatgatatagggagtggtttcaggttatgagcgttattattaaatcattaaccagccaccaatgaaactttcgagctgaaagttccaggggtgatctgttttgtttactgtttttttctagaacacccctagttcattcaatctgactgattgattcctgacatccccactttggaccgaatggttgggaaatcgatttttacggagagttaaggacgtgtaagctaggagaaccgtgatgggtcaacgcgatacacactccggctaggcggaaagtgggggagtccgtagagttccatttggtattttataagaatgggggttgaaaccaggggaatttattttataagtataagtaccatatatgtactccgtaagtacccccttaactgggatttcccttctagatggatgtggagttatcagatgggattgattactcgatgaggactgagggagagatatttgaaaaagaaaaaaaaaggggaattgccggtcatgtctgaccgcttcatgttaccgcctttgacaagcgggttgactcctccttcccatcctcattcgtattctttccatagggaattaagccatctgcagttcatcatttccatcagtaaactgtcttttccatcaagaattcatcagtcctaggccgtctgaagtcatatccatcaacctcggaccgaaggatcaccagtagactgtctgacggaggtggtgaggcctgcagagggtgcaggccaagatccggtctgtcaaggacaaatcccgcctatctgattgatctgataaccgaggtaatatgtatggtattgtcatgttaccaaacttaccaacattttctgccggcccacctcggaacatccattttctttccaattgcaatttaaaatatccctgtaaaacccctgtcacaacgtaaattgtatattgtaggatagtctcaattgcaatcatacgatattattactgtggtcagtccagatcaacagccgggactctcctcggctgttcccagcaccgaatacgggtaaggtacaaggtcatcttcatatgcaccgtcgatccggatggatatgatgaccccaaatggagcctttgccatatccagtagtcgagtccttattactactgactttcaagatctacataagaccatatcccatatcccatattccagctcttatatttgtgtaaaatatcaatgccggaaccaaccgcgtaacgtaccccgtgacgaagaatgtggcaaatctgataaatccctgtactgtttccgaccttcctgtgagatcccgtatttctcattcccataccgtcattttcactttcccggttccctgtacggaactatcgccccgaccattcttcgggtccgcgttctcctccctcatcccactcttctattcccatgctctattcatagaaagcaaaaaaaaaaggggggctttattacgtcccttaaccagtatcacgtctcgactcatataccccggtcttccctcgttgcgccgattcttgtgcaacttttcggcgactcccaacactcctctaaatttcctcatgggtatgcggagagcactcaatcccaattatttaaccttttgagacttagattctgatctatcgaattagttcacgccgttcaacctatcatgccatcggcgacttactctacggggtcccgtccccgcagaggcacttaccaagaaatcccagtgtcctcgacctcccacccagataacccaattccggaagagcctcgaggtgtgcgttcgctctcagtaaccgataccaatttcaacgtcatttcctcaggctcctcccagggcactgtatcgagcggctcaaattcccccgatacccctctaacaccacccaccgagtcccaatccgaggaagaaaatgcagaggaaaaggtcgacggtggtcggcaacgacgacgagcatccactgtcctcatctcgcagaacgcggttgatatgcgaagggtattggagaatgtgggcacagcaggcactcagaagcttcagtctctctgctgtggtgggggttgttgccggggacaggcattgcgccctgtagatggaccgatctcaggcttcaattccatcgttgcacctatcggcaacaaggcattcgatagcctcaagctgaaccttgacctcctcaccatggatagtgagctttccaacattgccccgctcccagagaagaccgtttcgttcaagccgcctcccgcatcagcagccgacttgacctttggccctgcagaccatccgccggaattcgtgcagccacaccccccttaccaggtttaccgtgcgcctctgttccacacccgtgagttgacaggacccggagccgagaagcgtacctaccactttgatatcgatgtcaccgactaccccgccgaaagcgggatggtcgacttcgtagtcggcggtgcaattggcgtgtgccccaaaaacaaagactccgaagttgaagaggtcctcaacctcctaggtgttccgaagtctatgcgcgacaagaaagtcctcatgcgcacaactaagggccgctggccgacaatctggggtgatgacaagccgcgcgaactcatcactactcgtcgcgaagttctaagctggtgctccgacatccagagttacgccccaacaaaaccactcttccgcctcctcgccgagtacacaagcgagccaaacgagaagaaaatcctcgaatacctctcctcagcccaaggccaaggcgccttctgcgacctacgcacaagctctttcgtctccctcacccaactcctaaccgccttctcaagctctcaaccacccctcgatcacctcctctccgtcctcaacaccctgatgccccgcttctactccctgtcccaagacccccagatctcctgccaatacaaaggcaccgaatgccgacgcttaattgaagtcgccgtcacagttgcagaatccgctgactggcgcggtgggacccgcacaggcgtaggatctggatacctggagtccctcgcgcggcgagcgattgccgcagaagcctccggcgaaaaactggacctccacgtgcccatgttccgaggactgatggcgaaccctctcgcaacgcgctttgcctcagatggtccgatgctgctcatcggcgctggcgttggcatcgcacctttccgcggcttcgtgcagcgccgtctgcagtcggcgaactgcgccaataaggtctgggtgctgcaaggcgtgcgggactcgctgctcgacgagctttactccggcgagtggggcgtgcatgaggataaggtgcgcactgttgtgcagagccgtaggggcgagagtcgctatgtgcaggaagaggttagacaccaggctgacctcgtttggttcgttatcaactcgcttgatggtcgtgtctttgtttgtggttcgggtaagggtatgggtgaaggtgttgaggctgctctcattgatgttgctatggcaaagggtaatctcaatgctcaagaggccgatatgttctggcagcggaagaaggaggccggacagtatattgctgtaagttttgatatgttttgatgtcttgggggtctatactgactattttcaaggaaacttggtgatcacttaaattctaagtgccttgacgcattgcgccttgatggttaaatgctcattcatgtgcaaaaagacatcattgttccttcgtctgtacatatttgtcccatcctgcctgcatctgcaaagctctgcggttgttctttcttttgcttcagcttatggctagatacactcggtcaggtcgtcgactggccttctctcgttttgctctttgtctgattcatgttcttttagcggggcggttatttgttctctcttgtcttttttctccttttgcattctttatttctcgggcttatggttgttatctctttcattttagttgggatatgcataaatcaatctttgtttctatctgattgttcttcttgacgaattcttcgcaccatatcccggaattatcacggcggattcgctgcttggtcttgtccgtctacttcacagcaatctcagatgccgaacccaatcacaaaacgacatgatgcactccgaaatagaaaactatcctatatggaaagggaatcgactacgcataccattttttgatcttgctttattttcactgttacggttatccctggccctctgaaccattgatccctctcctacttccatcaacctaccgcctatatctatgaagctgctcatcggccccggggttctcacttggttacctaagtcgcccttgatattcagtgttggtctctgtatattaatttgattttgatactacggaactgatctcattacggaaccatggccatggttgcctttgtcagcactagacaacagagctcggcaatttggttggtacaaatcaagaccggccataccatttgcagctccatagcctcgcgaaggatcagctgactttcaatcaacctggctaagcactaaatagggaaaaggcacagacaaggtccacaaaccgcgcggtattagacccagaggcgttgcgatgagatcgccgcgacgatgtcaccgttgatctgttctgttctgggaacctatttattcatcccagtctgaacttgttcccccttttcatcctattctctctaatcctatctatatcatggagtcctaaccaccctaccctattattccatcaggcagtgccatgtcgactaagcatcgggccactatcttgggctgcccaatctgattgcctgttatttcccgtctttccaactttatattcgaccagtttgtgctagagaaggaacagcctcacgtcataacccaaacagaaactactaggcaatcgtcacggtcggaaacttgaagtgcaacgcacagccttatattcgcacaacagtggtgacctaggtatcactcagcaaaagatcagggtaataaatcacccatccatctatctatgcatcatccatcgtccaccaaataagaacaagaaacactgttgttggagcgatcgaatcagatttaccccaaagtgctaggacataaaccaaacataacttgaagatacacatgctgcagtcaattgtgtgctcgaggtaattcatcaggacattcttcagtcgactttcaggtaaaacaagaacggcggacgcaaagggttaacaagcaaagcactagagcatggcaacaaccaccacaacggcagctgcccccattggcgcagcagtagccatagcagctcccgcattgggagtctgggttgcctggctggcagtgaacgaagccgttcctgctgtgacatcgatcccgtaggaggtgtaggacttcgttggcaggttcgtggtggaggtggaggtggaggtagagtacgaaacgccagcggtggtgccagtgactttcacgctaaacgaacaggaaggagactgggtggccttcgcgaaagtgcaatcaaagttctgggttccagtcacagcattgactgatcccgagcctgatgcggtatatacaccagtgagactgtaggtgcttgggccctggatcatggtccagggagtagcgatttcgcaatcagacttgggcgcatcgctcagacatctgatttcgtaggtggtggcgatggcattgatcccagcgacgctggcagccgtgctggtccatgggtggaggctgagtgaatgagcccattgcattccaccgccgaagtagttgattctggttgattcgtccgcagtgacgagggcagctagtgccgttgagagaaaccaactggtacgcattatgtatttcgttttgtctttcaaggttgaactgttagagcaactgatgagagattatgggatcaagaaagagaaagggaccaagtggaaacggttcctcttttaagtggcattcctcaaactatcagaggccggcccccgtatgaattcagcccagcaaatgagctgaaacattgcaggctaactatgcaactaagcaaagcgagagagtctcattggtttggctgtaaagggacgtgcgtagggcacccgatcagagccggatcaaccgctgtagcctaattgatggtggtggtgcagatgcactagacaagccaccatttgatacgcgccctttgaacaaagatattggggaaactgactgcaaaacccatgaagtccctcgataggtttccatcttgggggcgtgattagaggatcgagccccttgggggccgtttcacaagttctcactcctgtatcaggttggggccgccccaatcgagcagtggaagcataatgcatctcgacgacggaacaggaactttatgcactgataatgtatgtgctgttcttcgatttctatcggagaagacagaaatagcggcaattatgatctacggcatgggtggatgaatttctgtggagaaggtaagttgggagaaaacccgtagactggattgagtgagactaggagagagaaagagaggaagaacgatctaggtaaggagtaatgtgctatccaccttatacagtatgtttcctcggcaatttctagatacttttgcaatctctagaccgctactccgccgagaaaccgaccagagctgtttgagcgagcggaaactgttaaaacaggtgcctagtcaggcagtggggattggtatatatacctgatagttcaggccggtatactaactagttaactaactaaataggagctcgtcttctttctctactaactatgagcagccgcatactttgccaacatattatttgccagcctcgctgttgtacttgtattcagtatgactgtcgcgtagtgtggaagtcacatatctgacagaggtatccctataagaaaatacgacattgtcgggttgtttgaatatcccattgatttagaaagctttcccttcgtgtaatatataagtgatgcatagcatatcaaaggtgcagtgtctgtggtatacttaggtagtgttagactcgagaaatagagttaagcatccaatgttcctccgcaggtgaaccatggtatgaaccccgttgcacttccgaagttctatggcttccatgacttcccttccaaggtttccaaggtttcttccggatatatcaggcagtcttggaaaggcggtatgtgagctattcatggctgcctagcctcgagatattgttccaagtaaccatcctgaatatcatccgcatttcttccctacctaggtgacaccccttactatcaaaatgtcagaagaagaaataaaccccgaactccttcccatcaccatttccgcaaacactcttaactccaagtcctaatgcttcacgtttcgatctcctttactccaccatcgaagccaccatccaagatgtgcaagcccgatctgagattgaccgtccggacttaattgtgattaccgatattacaacacaagagggtgaacacctctgggacatacttgaagaaaatttcgagtcgagagggatccgaaagaccctcgatacgcgtaacagaaccttgaaaatcaagctgtgagtctatggcagggaaaatggaaacatatatatcgcttttcaacgaggcgtttattgctacagaatgaaagactgaaggtccctattttaagttgcaagatcatgcggtgcttgctccaggttagagaaaaggccacgttagttatttgctgttcctaggccgacaataggattcccgaataggaattcagttgcttctttcttatcctctaactcctcgtctcccgcctccttattagaagcctaggagacgtcgacggcaatgatctccctttgttttgtgtgagcaactaacggcaaagaagcaaaactaggtaatatttcgctgattgttatttccctctgatgtgacacaaagacgctaaaccgacgtggaagcagcgcccttatagataatacaagacagacacaaagttcggaactgtcacaatactcgggaattcctgctgcaatctgattgcattcttattcggcgcctgatgcaagcggaataagttgagaaggcgattcgcttccttgagccataacccttcggtgtggaaaaggttaaagagaccacacaacatcaaaacgttgagcttgacaccaccctcggtgatacaattaacacaacgagggttgcctagatgggacgattacgctaacaaatatggatgtaatgccacgtttgtgcaaattcatgcttcttatgaataggaaacagtgtgagcagttgaattcaattcatgtttctctcgcttagtttggcatctaacccgttaaaccgcgtctttatttccactatattactcttagtgaatctccagcgctgaaatgtggatatatttcaaggagataccaaaactcccctcaggtgtgacttgttcagcatatgtgataagtgggctatgccgtcctcgccactccgtactcgtacatggccttccggttcgaaaatggagcgagtgacatttagggggatatatgcttatttatatccccaattttattgcattaggaagtagcaggaagtgatacttctgacgtctcacataggatcaaagtctttcctaatcgagcgagaaaacgttagatgtcggctctaaatttagccgtcgaggtagcaaagctccaacgagcagaaatcagacaaagaaacaaagtactatactatcgacacggtctttagcgccgagtcaggcactaatgcatagcccaccgaaccatcacccgagctcccgtcgctacacctttcatcatccagcaactcagatcactccataggggcaggaattccatttccgggccttgcctaactgcctaacccgttcaagaaagagacatctgacacccacccgcgtcatttaaaagacaaggccccatctaaaaataatataatatttgatctgaccaatagaggaaagaccctgtaatatcactttgcatggcgacgagggattggtggccttatcacgaactatacccttggcacacccgaatcatgcatgagtggtcctccggtgacacgagtctatgttgttttgggcagccaaataagcaaacaatccggattattgtccaaattctagccaggtacatacttaaaacgtgcacctatcaacgacctagacgtttaattcagggtggtttatgcagagggcccttttgggatgcccattgttgcatcattgtgtcactatgctatggagtggttacttgtgctagagccataagctgcagatcaacttattatttttaattatatgttttcctaatgacaattcctttctgatacccacatcgacagttgggggaaaaagaagaagaagaagaagaaccgggcctgcttttgacggttcacaaaaaggagacttgtattgattctagaaggaattcttggcaattcaatattataatagaccaaatagaagctcaaatgtcaggaaaatgaaaataaggttaaacacccaaaaattggatcgaaaaataaaataaaataatagtatataaaataaaatgtaaaatgtaaaatataaaatttggaataaaaagtaaattaaattaaaaataaaataaaatataataataataataaatattaaataaacccccggcagacccaagaaccgggaaatgaaaatgacaaatactgcaagtatccatggatcagtatgtgctcccaccgatctggagtaattcctccgacgctagggtttacaggccaaaactatatgacccctctctatttcccctctcatgactctggcttctttgagaggaccaatcattcgcattttggaccagtccattctccaagagacgatcctggttgcctgcgagatccgatgatctgcattccttcatgcacgatctctgatctcgtgaatgaggatctaagggcatggcaggtatgacgatcggatgaaaattccaatttctttttcacttttctctacgcagtttctttgttgaagtgtacgaagatcctcggtttgagagtttcatgaaataaatctttcaaattccgatttttcgaaccagatctccttagaacgacgaatcaaagacagtctcggtagatccaaagctccgaggctgactccattcgatcggaaataattttcggatttattttgaaggggatcttccattcgatcggaaataattttcggatttattttgaaggggatcttccattcgatgggtgggtcgacaatatgggcctaaaagacatactttagggcccgaggtgactgcgctgtacggagtaaagttcagttattaaactttgaagtacatagactcgggtgtcagatgaaggcgggttattataggggctatactatagggctgtacaggggaaagtcaacaattccaatatgatgatagtacatagacggatacttgtctcatcgtaccattgtgctccaggattcactaggaacctgtccaatcaccaaaaaattcagaaaaagggactccattgttccgacttgattggctgactagcgctaggctgaataagactcagctcgcatttatgtactccgtacgaagagtagtccagtgatctccagacatgacaggcttgtgccactattgaattgtcagaatgtgactagtttctagagcgggtctgttagtgcaatttgtgtcgtgtcaagctgagaaactgctccagaatataactagtggtccagattccatcgtctggacgcgatacgcgaggtaaagatgctaattagcgcaaatcactcaatttacggtcggcgaggttctgagctaagtacccaaaatgcaacacaactaagagatatcatatgcgagcgtatcttcaatccaatcatatcaatagccgcgatgttaccagttcacgagtgcattacgtcgtgacagcaggcgggaaaagaaaaaggaaaaaacgaaagcgggttctccgggtgatccttgatctgacatacaacatacaacatacggagacagaaaataaatttctaaaaaagaaaccagaaaaaaaaaaaaaagccttgggcgccacaagctctcgaaggaagtggagagatacaaattgaagaatcccttggtgatctatccctgtagaccaataccagcccctctccctttccatttggtcgatcaatcaccgtgcccaccgatgagaggctctaggcaatctacgatcgatccgagacgtcacctctgcggattctgattcgcccaaattaaatccagaacttttctgtcttttgtatccaccatccgggttaagctctcttcgtgacaactctccttggaagtggcgatcttttgtgattcggcgtctggaagatccactttggatagtctcttttttttggttttttaccatacgaggttctacatcttttagagttgacactctggttgtcttttcctcttccaccggagtgggtgtttcttcccttttgtcactattttgtcacgaactactccgtaccgagtactaaatcccgagtactgaatcatagatcccccacaggaaaaaagcaatatgggtgtgatttgatttaatatgtatttaacaactaattaactttagcctgactcaggcacatcatgacagaattcccccccctccttactcccctgtctgtcggacatcccctcttccccaacatttcctatgtactctctgtatattccctatgattgttcttttataaacatttacttttcaagtatactatactgtctggattcagtgtgatttcaaaggatcttgggagatctatcttttaggataattggaaatacttattggcttataagcactggcataggatcccctaatttgacgtacactagtgaatcacaccaggtttcccaaagagttattatattttcaattaccaaagaaccccgacgtcctttaccccgaagcatccaatcaaacccccctcctaaaatacaacggagtggttcgtaagatagatccgctaagactatttccataggaaccaaagactatatctgtcaaccttaaccattttctcttctccgctatgtatgcccttgacgcggagcccttggtgctccgactcaatgtacccactaagcccacgatcgtcatttttcggccccccctgttcttgctttcccatggacctgtaccagctggatctttttttattttattttatttttaatttactttaatgtagattttggggccacttttttttatggtagaaataatgtacggggccctgcattatttgggaaaccgcatttccatctttgccctcattccccaaccttgcatataatcttggcctttctcttttttattttaccatgtcaacgtaaaatcagcctgctttccctggtgagtgcttctttcggatactttcacccctcatctcctccctcttataccttttcctggagagtctcgaccttttgaactacagactcgtctgatattcgattctgactgtgtcgagtatagttcttattttgtaatacactgtgaaactatttccggacatttctactcttgtccctcccccgaataccttgtctatgtcacagtcccatgaggtagacgaagataccaatatggctatttcgtatacaacccagtcgccaaccggacaccctcaccaaaccctcccctcattccgcgaggtaagattatacccttcaatcctttcagaaatacgacctgaagtcaatatctaacatccctcagctgctccccgctcacctccacgatgaaatcgaatcaacatccccattctacaccaccccccgccactcgcaagaccgcccaccctcaggccacgaaatggccaacccccgctcaatcacatacgccaaccaaaccaaccaaattccctatgaatcccaccgtgaatacacagtctcccgcggcgcagaccaccaaccccgcatgccagacccaggccaccacatgcatctagccgaaaactcatcccgcgggcccagcccaattctccccccaatccgtgacctggactccattcctggtcgagcaatgaacccggcctccagcagcgggtattccgagcgccccccacgctccgacccctttgttgcacaggaataccgccagcctgcgccgactgcagcaatgtccgctgatccgcgtggcgagcactttgcccagcccatcatgcatccccagtcgccatatggacaccctggtatggcgtatgcggatgagcagatgtcgccgcagataatgggacacgggcagggaaatttcggcattatgggtgacccaattgatcctaagacgaagcggagacgggggaatctacccaagcctgttacagatatcttgcgggcttggttccatgagcatcttgatcacccttatcccagtgaggaggataagcagatgtttatgacgaggacggggctttcgattagtcaggtgagcatgtttgaaactggagactggcgactgagttgctaacttttgtcttttctatacagattagtaactggtttatcaatgctcggagacgacagcttcctgcgctgcggaaccagatgcgcagtggtgcggatacggagtctcaacggcagtcgccttttagtgatgtggatggatcggagcatatgccctctcctcgtcactagtggcgataaacctggacctcgaggttcgggtttgatcacggcacccttcttttcgtttctattcactcttcaacgttacacggcattcgaaacgtcagcgttttattcactttacgactgggacgcttttatcttgtttctctctaccatttacgattcacggggttgaggacggcgggcttgatagactggcatctttcttcctttttcctatgtgtttaatgttttttttctccccctttctcaccttccatgtccctggagttcactctacatgtcacattgccgtccggtacgaagactctggccggacattatattttgataccctttctctatggtcgcgtttaccaagcgggaactcatttcgtgggaaatcgacaggcaaaaggggtacacgacaaattatggcattgggaatcccattgaatcctttgtatgatctactctactttgtggttttcttttctctccatgttgcgccgcatttccattgcattgtgtgtccctggacaagacccgcgaaaattgcattactaggtgttctttcaaatctgcctgacactatttttctacgcagcggtataacggccagggttcaaaactcgctttttgggggtgttgatgcctgaatgcctcactttgaaacggcagaaaaattaagatacctgaattactattacatatgccttaataagcaaagtacgctgtttctgctgacgttatagggttattataaaatgaagccttttgctcccatacaaatccatacatctccatttttggggaggtttaccctctccagcatgaaaatgaagcctttttctcccatacaaatccatacatctccatttttgggatggtttaccctctccatatatgaaaatgaagccttttgctcccatacaaatccatgcatctcccatttttgggatggtttactctctccatatatgaaaatgaagcctttttctcccatacaaatgcatatatctcccacttttggagaggtttaccctctccagcatgaaaatgaagcttttttttttaattcctacttacaaatccatatatctatctaaccctccgtctccgatggctccgccgaggtgttgtaaccggagatctagcccgcttccgcctcaccggctctgctctcactggctctgctctcactggctctgctctcactggctctgcgtccactagctctgcgtccactggtgctggacttggtgtagttacatagaaaggggccttatcctcctatggatcagcctcgaatgaatacgtatctttataccgcttcacaaccacatggagcttcgccttccgacctggaagcctatcaacaagctccttcacagtaccgtcaaaggaatcatccactcccgatatctatcgaggactatatttccccttcgcgtactatatctccttagcaaagtagcatttgtccgtccaccctagactgaaatcaacgatactcggtagcgctataataaagtaatccctcgcaaagctgtcgatatttaagaccgtttgtttaggacgaaggttaacggaaactgaagctataaaagtaataattagcttttgcttctagattatataggaaatatatactatccggaattggatttgtctctcttggtttctcctagagatagaaaatcactattatagtgatttgtttactcgcctctttagcggctttccgagcttcctctgcctccttaaacttcttagtataagcaaggcggtttccgctgactgtattgctccggaggttagcgaaccgagtgcttgtgtactaggctcgtgtaggtgaaggccccgctaacgaaggccccgctaacgaaggtattgctaacgaaggtattgccggcgttataggtgctactaaggaagtaggtgtaggagttgtagagtcgaactcctataagagggtcctaaaagcctcttgtgctatatctgacaaatatatattggtagagagtatattaaatgtgtagatgaataaaaatgtggaagaacttgatagataaaagaacctggatagagaatgctttaatttagatagtattttaatttgaacgatgtttttaaccgagatatctatagatagatttatatactaggctaatttgtaatattaaatacattttctacccttccgagatatactcctaatactcctctttattaaatatctccgagacattctctcctaatttatccactatatgctccttattgggatcccacttagctacacctattggctttatataaacgtcgagtatcggatcttggcccgaggcctaatgcctatatactcgctcccgtagctttatatacaccgctttaaatggagacttagagtcactagtaaaccgaagatccggatttatagggttaaacggtatccctataagctcttctccaattttaactagctgctagtaacactatacaaatgtgggcggtggaaggtatttattaggatcccattcctatatattatcttgaagcctttttaagagctatgcttggtctgatactagatcttagtcaatctcacacttgaagtccttcgtatcccctttcggtaagtgaaagtttattgctagctttcctaggactagatgttcttggcgagtatagagctggatagggtgggtattctaattctcggtgtatgatttaactcgcttccgtatagtttctatatagactgtaagaagagatacttgatcaggaatactatcttttgtaaagcagttttcgtgtgctaggcggcgaaaaaagcgcttcttttaaattagtatagaatcaaattaaatattaagttatagtgcacttatatagaagagcctagtggttgcccttgataatatcccctactatacctcaatacgctagttattaacacttcttccatatatctagcagtctttaggtttaatagagggattagcttagcgacgaagcttatagtggctattagctaaaagaacagtctctacacctcgattagatcggaatttccttggttaaaaccctctttcttagaaagcattagtggcttagcgtaaaacgctaaccgtagtgcgagcggttatactaacgtatatctagataatataacgagagtatccgtcaattgtggcatagatcttaataccgaaaggttcgagctttatatatccgtcaatataccatatatcgtttggtcctagggacatatagtttatccgttcgcgccgtgaacctagaagccggctttgtacatcttaaggccgaaggagacgctacgcaagctcaatttaggccctaaagtaggttagtataggatagagaattagagtatagagaattggagtatagagaattagagtagagcacttactctatataaaatagccctatagaacgaatatggcgatatagagtacggtagccaaagtcctcaaccttaccaataatattctcatagataagaatggcttagagatcgtcaaattgttgctatcgctaattaggggagagacgaagcttaatattaaggtccgctcgaatccttctgatagtcctctccgataaaggtctgccgtctacggcgagaattcgaagaatttcgcttatattaaaccgagatataagtgctttaacacgatcttaaatctctaccctaggggtaagagtaagattatagcgtataggcggtttctagtaaccaagagatctctatagggtactgcgactaattacgatattgtatcgttcttcgaggatagcgcggatgtctatatatatggtgttctggctgataagatcgagtatctcttctttgtagggctctagatcaatacgcgggcgcggcatagtttatatatagagtagtgtatagggaataaacatttgtgggatgacagcttgcaaaatgggaagttttaatatagactagtaatcgatcgggactagttattccgcgccggagagagagagtcggtaaaccatcccaaaaatgggagatgcatggatttgtatgggggaaaaaagtttcattttcatgctggagagagagagagagagagtaaaccatcccaaaaatgggagatgcatgcatttgtatgggagaaaaaggcttcattttcatgctggagagggtaaacctccctaaaaatggagatgcatggatttgtatgggagcaaaaggcttcatgtttatatgaatgtttacaatatattgtatagagcggtgtaaaaggcggtactcattaaggcatccaggcatcaagatcccctagtaaaaagagttttgaaccctggccgttataccgctgcgtactgacactatttttctttcttttccaaatctcattttccgattctgataattgtcatttctccatccctacaagcgccaacgcggatccgagatgtgaagcaataccgagatatggagtactaagcagatctcagctgcccaccgcgcaacccgtctccactttgtccccatcgcgactagcctatccatgttcttgctcgcatcccgaaacgtggatcttaccttacccaggctcttagcaaacaccctttcgatccccatggtcttgcgagcttggggactggcctggatataatttaccgcatgtcgatacaatatacgtgaccaaagctatctgaacacataattttcttgagccattttcaaggttccagggaaatgccattgaaagagtggcttgcgggccgggggcaaagggccagaaccatggtttggactgtcactaaaccactaaattccaaattgatagacccgtaaactagtggatattcgactccaccagggcatgtgtcaagatcgaccccatttttgactttttattttgttcatgacgtcgacctcgggagttaccaaaatatcaacctcatccctaccacggtctatgttccttttaactttcagataccgcttaaagtttggttcgcgagggacctcagtatgatctgattctgttatacgccttgaattgcattcaacattaggcttataataaagttatcgaaagtattaactttcaagattccgaatggattccaggcgtgaactgacagctgcatggaacccaacttaaacttcagcttttcggtccctccgtcggtccacaaatctacaaatctacaaacttagacatccacaaatccacagaggaaccactccagaccatggaacttattttgactttgtgtcagccacgtgagcccggattcgatccagatctccttctacacggggtatattcggggcttttttacctttgacagccccaaagcgaggtatatcgacgtgttcgaccagacttaattttgatgtggaattgaacatgctaattaaacatttacaataacggatggttcgctcaaccatacatggcttattctggaatattaactaagcttgctcggatgctattccgattccgaaacatacctgaattgagcgcgcttgggagctgagacaggtgaaattctcttcggtcgcaccacattactaacggattgtacctggccgtttctattttttgtgttctttctagtttttccgagctgaccccggaagacacaattatggggtcctgacagaccccgaaaaacttacttgactgccgatcttgggcttcggccaccctaccgagtagaattgaatcatttggaggggcggatacaataatacggattatacgatgtaggatctaccaccgctcaggtatgtacagatctccaaatttgagactccagtgaggggactgcaacccacttggttgaactcatattttgaaaggaaaaaaaaaaaagtgatatcaaattcgcatcccatgaaccgaaaggaaaaaaaaaaaaaaaaaaaaaaagaacaaacagggaaaggaaaggaaaggggcaaaaccaggattagggttgcagttacacatatctgccccgtgctgcaaagatgtaaatagcatctacggagtaatgtacctcgacatcataaaaagcaaaataaaaaaagcaagcatcccatgtatacggagtacaaagtacatatgttgtaccctcgggatacaacataaagatataaacgactaggggttgaaccccgtaacttagtcccagataggagggcagcggatatgcaagccactcaagccccggtatgcactatctctggcgtccacgactggccgatctcaaaagtaaaaaacgcacccaacgaaagtcgtgcagcgtgcagcgtgcagcgtgcatacaacttccagttttcgtcgagctcggccgaatcacagtctatgggaacatttatccaccccccttaccgttgtacccttacaaccttgcctctgtcacttgtcaaccaacccaagacaaaatgcccaaccaaatcccggttctgcgggttctgcgggttctgcgccttacactttccgaatctgtttccgcccttagatttctcgccactacggtggaaccccgatcggtgtcttagccacccccacttcagccattcggtatccagatacttgcatccgacccgtcacatagcggtgaaattggcgtctgacacttcgttgtgcacatgcgcacgtatacacatttggagctgtattaggcaactatcgcgcatatgctccgtacgtcgcacatatatgttgggtgctatgtatgtgtacgtcttcccctctgcgctgtcacgggcgcttaggcctcgattatggacgtgcgtgtcgatcacaacgacgtttctgctaggtgaggtaggaggcgtgcgctttcttcttccatcggaggtgtcaactgcgggatttgtgagctgtctcatgtcaggatttgggttgtgagatcgcgtgtagatcgatagattggttcgtgcgatcgtgactctcaccgtatactccagagaactacatagtactactaggacgatatccgagcacacctgtacctgtacggagggggtacagcgtatgtaggtgttctccatacattcatatttgaataattggatcggagtacggagtacgcggggcagtataatgtaagtcatataattcaatccgatcacagattggatttcaatcctcactttgaagggggaattgaaaattgaaacccttgacctacctgcttgaatgtaacgtcatataatttattgacaatttatttttagatgttcctcgctgcaagccgactgccatgatcgggatttgatcccatccaagcttcacacgaactattgaatcttgtcatttaatttcagacgatcgacagacccaccgttcgacgtctattatgcactaggttcaatagcgtcgtttagcctggccgcagtggcttttttgacatttgctttctcacttttgggggtctttgctcgggggtttgtattattgtggattagcgttatcctccgtagacgagatagccgcttgttccccatactcttctgtactccgtactatccgccacgatataatagcccgtgtttccaataatgtacgtaagtatgggtttgcgagccacgggtgtgattgtgggttcatggagagtcatgttcaggtaggatattgtgtgcctactccgtaccggaaacaggttcgatgctgtttattcgtttgtggtatgatgacatggctgcccacgttctaaaatgggattttattaattaacatgcctaggtacatacgtagatcagcttcacgatcatgttctatggcgcataccactatattgtaccagcaaagtatcaaccaggcgcttatcttttgatcgaccaatcccaactaccagcggcatgcagttatgtaaattatgtgctcttcgaaatgatatatgttgtgtatctataataccaagtcataactgtccatctgtgtgccacactcctcactctcccatcacagttctgtaaggggagaagcaagcagcacataaatgcaccagctgtcatgtgcacgaaatatgtatgaccgacacaaccaagttatacatgctgcacatgtaatgccacgaagaaaacaaaggagaatatatgagatatcgggcatgctactagatagatttgtcaatgcatatcacttctcgggtatctagaagctcgggcatctcatttaggacgctaatgcacactcgatgtacttgatgtcatactaccgtcgtatgtaagcatggtatttgaactaccttctagtacagcatagatgaatttactctagtgggttgcatatctaggtaactcggtccgtgggcattaatcgaaattatgtcctacggctggaatatctgcttgtaaacggtcgtaagtatatattatcttgacatagatatgagttgtacttctctttgcgcttcgtgcgtggtatcttctatgtttcgacttgggactgagactcgaattggggagataacgaagatagatacgccaattagatgactgtagagcttttaatggttttcgatattggatattgaattgtattagtaaaggcaatcccaaaaagagaccctggtcatgaggagattatatggtctggaggaaacggattatacctacagactcaacttattgatttttattttttactacggtgttccaaagaggattcctccagctgtatgatttctactcggcgtatggctcagcatgccttgctgtcgttctgctgtcactcccagtttatacagttatgtcggggagtaatcatactgctttctacagcgagatgtcttcttctacaatgcatattggacagaactacgtcgcatagccgctgtgtaccatgaggaaagaaatttatatgcgcttcaatacatctcgcgtaatgtctaataaattttcagttgcgttttctagacaagtttatgtctcgctggacacaggtatgactatttcaaacttcgctttttcgttgccacgcttgtttaggtctgcgccaggacaagaagattgcaactttggctagttgtgccaacgttctactatagcattgatttccaactgttgaaacacgcaatacatgtcttttatatatagctcttatatagccttatatagttcatattaacaacaacactctctaccctgtacataatcatatccatgcctcatccgagtcaagattaaaatcctacaaaaccagcagcatttcaattttgtgcagtcactaactttgtttctattttatcatctctagatcactggcaatacataactaggtcatgaaccagccaatctaattcctcacaaaaaaacgaaaagaaaaagcccccgaaataggaagtaaaatctggcttctggtagaattacgcagccaaacgcaaaatatcgactctacaagcctctggccgctgatacccacagtcacgtgcataataagcggtcataagcgactacaagcgggtctaagcgggtccgacgtgattttcacttatcacgcacatttgggccaaaaaatacatatccagcaggccggctggcccaatggcaaggcgcttgactacgaatcaagagattgcaggttcgatccctgcgtcggtcaattttttttgcaattgtttctttagctcagaaacatgctgctggaagatgcggaattgtgcgaagcgattggggggaagagatatctcacaatcttctctttttcttgattctgtcgtccataccagagaagaaaaccaagtaccaccaggcgaacgagagtatgaaaagagagacgaaatgcccgtagtcccacggagactggagtcatgggcagcaggttacttgaatgatggaaagcctcacatataaggtgaattgtaggggacacaatgcggatgttgtagaagcacggatcctaggttagtattgggagacgttggctcgctgtaacttttcccgtctgaggatttggctgctggatatcaccttcggtagagacaagagcccgcaagtccccatcgaatgatcatcatttataagttaccaagaaatactcccgcaagatcttgttatatagtgtggcaaatttcctagagaacgacttttagaaattgctcgccgattggcgacctgccaactataaggttcgtcgcccaaaggttctacacgttgactggggggcatgagctcgcgtttgcattctcatgtaacaatgctgattctcctagtcctttattaatttctttcggaaatcgacagaccatgtatgaatgcgagtgccctgggtcagttctgtaacctaacttatactcgcatatccccttcatacacaccaccattgtcaccccgtcctataaaatgaaactgcaactcggcgtcagtgtattcgtacggaataatattgggacgttcattcttggcaaacgaagaggaagcattggagcaggttcgtccatcaggcgtcaatagggaattgccacaaagactgccaatcttttatttccagatccaagatttttctagcgtctttacaattaaagaaacctggggcctaccgggcggacattttgaatttggcgaggctttcgaggcctgtgcagcgcgagaagtggtcgaagagactgggcttgtggtccatcacctgcggttcctggccgtcgcgaacagcggcatgcacaaagaaggcaaacactatgccgttgtttttgtcaaagggtatgtcaataagacccgagaggggggtctgccgcaaccgtaggttagtactgtacttgaagcagttgattggtgtgttttaccatgaatggcattagctccccgagcccgaaagctgcacgtcacgggagtgggtttagtggggtgagctgcattgttttagcaaggggcctgacaaaccaggatttgagggacggagactgtcttcgcctcttttagaattatttcagcagtagccagactttcacctgtagccgtgctgtgttaggccatgtgatattttatatagtgatgccaataaggagacggctttattccatattttaaaggttcttccagtgatctccaactgtgccatccgtgctgaatgttaaaataccgcagtaatcggaatcatgagttattttttcttgatcattaggagacactaggactacaggagatcccatatgcaaagtatgaacaaggtttgcactaccaaaggaaccaattgacatggtttgttaagccatctaagaactatttaagaaggtaacatgttgagtagttgactgcctaattaggaaggtctgaatttcagaggcggggtatagttagcacttccccatatataaggctggtgcagatcaggaaccaagccgcataatcggaaataattcctccacatatgggcacaatccactttgcaccttttgctatttcccgaatccacctttaatcccaagtatcgacttacgtcctacatgagggccttatatataaccaacagtctttcgcaggtgtagaatagtggtgaggagcttgacatccaacttcactagttacaggtggaaaggcggccgtttctagccccagaagcggtcattttcgtcaatttcacatgttatcgggttctggtagtaaaccaactaaagacgctataatgcatgttggtctagacacgggtcgagagatttacatcactaaacatgtgttcacacccatcgaccaaacaagatagggatatctaactgtcaaaacggcccttatctctgagacatgcatgtacatcttccctgcaagtacttcgtacggagtaacctatatcgggaagcatgccggtcgcgttgacggacatcaagtcgcaaatcaccatgcgagccgctcggatgtagacttgggcgtttgagtttagattcacgtcttgtggcttcatggcatgtgttcattggaggatccatggtcagtcggccctgcagggaagatgcagagaagcaataaagaaaagggggaggggaaaccctcagctagccaatcagacatagtttagacgtgctgcttgatctgactgcattgggttgttgacccctcgttgatgcatcacgcccatcgtgagagggggtatggctgtctggcgacacttgcgtgctgtgactgaaggtttgccaatgcattactgcgcctctgaaaaccgggcaatatgctctctcagtatcattatccgagacatgttgatgtgatcggcgtgctctagaaagatcttcctctatactctacaggattgcttctcccgaacctggaaagataacaatgatttgcatgaaaatagtgtctattcaacagtgggtccagcacttccctgatcatggtagtaacttataaccacgcccggaccggtgatcccaaccatgttcacatcccagccgttggggggcgcatcgccaaatctctgggcatagcttgcttgggctattccgccacgccgaaggtaaaaaaagttacgcaataataatctttagtgatacagctcgcatattgcagcttaatcaagggtcctgataacgagtcaggccgagggcatcggctagttcgttgccaaaggatgtgggccagggagctagccaacggtcgattaccccagagttcaacaagccaagcccaatccagtattcaggattatagtatgttatactccgtacgtatctttgtactccgtatattaagcgattcgaacagaccgcttctttatccgatgttcccgggttcagctaaaaagggcactaatacccggatgggtaggtgctaaaccctctctgcatgaaaattatattgcacgatagagtggacccttcagaggcagcgaaaagagatacctcggctgatttggggggatttccgcgggcgactgctgtatattcttccgcattgccccttagcgttgcgcgattagcgagtttaggataaattggaacaacttgctagggttgtatcccgggttaatattgtgattagtgaggccgaagctcaacactattagaatatattagacaacttgagggtgatgcttaatttccgtgcgatcggcgaataacatcaatgtgaatatcatatgaataattgtcactacccgctcccctttcgctttaaggataagacataattaatatggaggatgaggcgtaagcacctctgagatccaataaagaggaggcgaagactagaaaacaccatatctcgaagggccccctcaagtataagagcaaataaggctaaataagaacgactaactgatagaaggagggccactagggcattaaacggcatgatacccgttgttaagcgggcctagaaagttacaaggtcacattgctgccatctccaatcctgatagccatttctttcctttccctttgagacatttgcacatgttaaccaatgattgtccgagagactgctgtttgtctgttgtccctctccacttggatcctgatcctccccacttaagatcaatttaactaaggggattgccaaatcatactacagggtctgtggctcttgactctggacccttgcctagatcctttttaggtcggaattctccgagcatgtcgaagacgcaaaaaagtggttgtattagataggaaaaaagtgaaaggactccgcgatatcttcggaattcggtgaaataagacaaactagtcaagaatcaaacgaaaaaggatgtacctagtatagatcgcgccactcagccccctcaaaccccctctcctacggttttcgtcggggaaatcggctcaggggggtagttaatacgacattatcaacccctcttgaaagtatgcaccgacaatcgctacctttctagaagccaacgggaagttgtcggattggtggatgcatattcgattaccccaggtccgccatggtccgctataatccgccatgaacaggatatgtatgttgtacctgcgcggacgcttcgatatcgtcagtaatcggtttcttgtcgcaattggctcaatctcctcacccagcctagtggccctaatgacccgctattataaggcttggatctccctgatagacatgagatgatcttcaggttgtttgatttggtctttgcttaagggtctaattgttgatcagcctttccttcctattttccaacttctcaaccttcccggtcgatcaggcatagacgatcccctaaacagtacatacctccagtacacttacagtaaccattcaacctccgatacaatgacgagaactggccctccaattaatcctatctcgtgggacaccaagactattgttccagatgatggcagcagaatcgattcggtcgcttgccaggatgcgaggccaaaagggcgcatccgacgatcaatgactgcttgtcatacctgtcgcaagctcaagactcgctgtgatgttgatccccgtggtcattcttgccgtcgctgtttgtcacttaggttggtttcgcctttttattcatgtgtttgacatatccccgatttttactctttttgaagtctcccgtttctctatatgctgactattgtcataaaaggcttgactgcgagctccccgagacaacagagcggttccaggacaatgcatcaacctggtctgacgccaccgctgtaccctcgattgaggaacggctcgtctctctcgaacgaggaatgggggagatgatacatctgatgcggcagatagtgaaaagctcccccagcatgccctgcagcccaaccttccaaactagaaaccacagcatagatggaacatcttcaagtgatagcatgtcctcatctttctatccgctcaagccagcgcagctcattcgggacctgcaagccgaatgcttcggcgagagagctcacttctccgatgctgacatcctcggggatatcgtcacccagggcatcgtagattccaagctttccgtgaagctgattgaactgtgtgtctgattgtgtgtctgtcactggatcgccctgctaatgatctcgccagttttgtcgaacatttcggccactgggtctcaataaatcactcgtccagccttcaacggtcgaatacactccttttcaatactgcatgtctcctggcttcgcgctatatgcctggcctaccacaacacactgtccgcgatatctcactctatgtacaacatgccgtcgcgaaggtgttgtggaagcccccgcccatgacaagcgatatgctgcaggccttgaccttgctttgtctctattccacttctattcacaaagaaggcctgatggacgactggttgctgagcgggatctcgatcaaccatgccctcatctcttttaactttctcaatactttgccaggagacaatttaagtccagacgaactccttgctcagttgcgtttgtggaatacactctgtgcaacccaactacagtatgtcctgcccaacaattcgtcaggtatacaatctaacaccaatccaacagctccgccctcgcaaacggccgcactgtcaacatccaacaacaatacatcaaccaatgtccccgcatcctagagcatgcaggtgccacaccagaagacggaagaatcgtcgcagagattcaactataccgcatcgccctccgactccaacacagccagagccgcctccaatttgcagaatctgaatacgaagaactggagcgctggagaatggagtgggcacatctcctaagtacatcaaccctcccctatatgcccagccactgcaatcccaatccaaatctaacagcgacacccacagccaccaacggagactcaactctcaacctaaacctctggttctgccaactcctcctacaccgaaccgccgcgcgcctccaaccagacagcgagcgcctcctcccagaaatatgcggcaccgcccgcctaataataacccaattccttcaaacgcgcttcacgtccgcacccgctctaatcgaccacgtctacttcatcgtcggctacgccgcgctcacactctgcgactacacgctcaccgacccattaatcaaccaagtgcgcggcttcctactgcacctcgcgccaggcggcgacaacctctcctaccggatcgcgtgtattgtcggcgaagtgcagcggcgctactcagaggcgactgctgttgtggcggcggggtcgcattcgtcgtcgccggttgccgaggtcaagggcgcgcagatgttcggttcatcgcaccatcatcgtaccggtatggagctctcgcagctgatgtctagccccgagggcttggattcccttgttgagggatataattgtcttgagcagatgatgcctgggtatgcggcttcgcagcctgcatttgaggcgccggatttgtttcatcattctcctacgactggtgttactggtggggctatgcctattggtctcgtgcccagggctttgcatgattggtgatgaggttatgggttggtcttttggttctagattattggagttggtgcatgttgaactaataccgaggttggatttgggatttgggtgttgtgttatgtttctttttacttgaggatcgtaataacaaaagtacaaatggaaatttgtcctgacttcttcaactggcttctctgtttcgtgttgctattcatcaaagtaatatatattacctatagctggattcaaattgtattaccttggtagttatctggcttccaatatgcattgtcgtctcacatggcttagatactccaatacttcctcaattcagcatccagcatggtctctcatctcctagacaccaggccaacaaaatatgatagtattatgtataaagctgataaaccattcgaaaggaggtgtccacgggtatggataaaaacaccaactcagatgtaataatatatacactttctccttcccaataaagcaattggaaggaatatctatctatcaggagccctcgaaagagggtacaggcagttcggcctcgatcagccaaattaccaatatctcgaacacgaagtctatgatgagcacagagccgagccctcgagcaaagacgtggggagcaagatcctcggcgctccactcgccataggaacagacacctccccactatcaccaacagtaacactagtgcaggacacaacctcagtcaacttcgcaccagccttgaatccagtatcaggaattgaaactgaatactctttaccccctgcaccgagattcgtcaggacagtgattgtctgtccaccgacgaagcccttccgcatggcgatggcgctctcgtctttgtagattgggtggttctgtgcagaccgagttagtctcttttccttcttctccttcttattttgagacacagagagagatgagcacatacctggtaaatagtataattggtactcttagcaatggcctggtttctagcaccattggccttggcaatgagcttgtacagctcgctgtcggtgttgtatccggataaccacagagcctcgcgattagccgggtcctcgccaccactgtagtgctgctcctgtcctgcatagacaataggaatgccatctgccataatggtaaatgtggctgcgttcttggcgagggcaatgtcatcggtggcactggattcccgaggtcagcttctagacatacagaacggaatcatactctgtttctttgcatggaatttccacgtactgggcaaaacgtgggttatcgtggttctccaagaaatttccaagaagggttgagtccttgcaggtcgatttcaccgtgttgatcatgttgtacagatcggtcatgcttcccgagctcgactggaaggccttgaggagtgggtagtaactatttgcacgagttaggtttggtttctctagtagattccatgacaagggtctcacatcgggtagttgagcactccgtccattacctcctggtatggacaggtgtaatctgggtcaccatcaaggatttcgcctacgcagtagacgcccgcggctttgttgtagccgggccagaaatctttctggacatgtttgactgtgtcgacgcgaagtccatcgactatatattggtgagtttctagatacggcgatatctgctgaagcaggggagttcttttttttttagaaaaagaagaaagaaagaagcttactggagtagttggagaccaatgatccaacccagtcataccatagatcctgcacctccttgctctgtgtattcagatccggtagcgagaccttgttatcgccaagccagcagttttgcgacatggtgtcgtcgttgtaatcggtgattgggcagtaggagtggaaatactttgcatcgttgaaggggttgaatttggtgtagtccacgtcagcacctgcgccattgtagccctttttatccaatatatgtcagtctcagtccaggtgattggtggcgtgggtgatttgactcaccatgtggtttgctacgacatcgaccatgagatacatgtcgcgtttgtgcaaagccgcagcgagggccttgagatcgtctgcggttccatagttggaatcgagagagtagcttagaatttgtcagtaaggatgcaggttttgacgaatttcttttctgctttgcgatactcacatatcctgctgccagtatccgtgatagggatctccgtacgcggtttccccgctcaattgaccggtcaccggagtgatccaaatggccgtaaagcccattccttggatatagtccagctaagatattggttagttgggtgatgtaggaaggatcagactgttactgaccttgtcaatgataccctgccaggttccgccacagtatttctatccactatagttagctctatctcaatgacatagagcctacgaatagataaaagcttactctgtcagcggtatcacaggcagcagtagttgaaccatcggtccgggcaaaacgatccgtgagcatgaagtagatggactgcgagcgccattccgctggggtcgcagcaatggcagtgctaaccaggccggcaagccaggcaagccgagctagaaccatcttgtagatgtttcaccaccgatagctcagtaacagaggagaggaaagtcgctcaacagaacattccaacaaaaagcgctgcggggccttggtatatataccctgcgaaaaaccatacatacaacggcatatgaaaaaaatattggagacggatagccgttgaaatcggactcggtgcaggattatggcttaagctaatagacgccaaaagcccatatgaagatcgtcacagacgatcgtaaatggacagtaatccctctaaatccccgaccccggtcacagcaacatatacaaaagtggaaaacagagagaggtctctgtatggccaagaagtccataattaattcacagataatctcccgaaaggaaaaccccactatcatccttcacacctgatccgtcacatcttgatttcccccagcccggtaaaatacagagtcacaagggtatagatgcatgcataacctggaaattcccaggtgattagcccagatcacaaggctacggcatgtgcaatattaaccctgtcgcagcccctgacatgggctttggtcgaatcagcgtgtgcggggcctacctcaaattaattacaaagttgcaatggctattagctcgtttgagacgatgtggatcttttggatattccgggttctagtcggggatcagtcgatgctaacggtcttggtcttggtagatgcgactagatgatttagggtatatactccgatgttagggggactctagggctactagtaggggtcttatgacggacgaaacgcaaagacaatttatatttgggcttcataactcgggccgacataggagattaaaattcgtggatctttgaatagccgatttgggaatacgaccgaggatccatggacaagaggtagtcgtatgattcctttcttactcggctgaggtgaggttatacggagtcgtcactttagcagtgggtggtctttagagagtaacctgaaataagacaattgggagatattacgaaggaaatatgtatataccaataagaaatccagcgtgacgctatgaatatagatgaatctgactgctattgggataaattatagagaaaacagcagatttgcattccgaaagactcattttccaactatccctcaatgcatttcacaatttaccacttcaaagcccagtcagcactaaaagcaccctttctggtcaacttctgcaaaccgccgacggacaacacacgcgacgtagcattatactgcaccccagaagccggcacaggtataccattaagcttaacagcatcaggccgcgtagacacaccaagaacagtaacagtagcgagaggattcaactcttcccagctaccctttgccctagcactcaagctggactccttgacactgaaagtaacatcaagcgtatcatccggggcattactctctccatcatcgagatacaactgtccagtggcagttccgctgccaccgagcgcgacaagcaaagaccaaggcgtaccacgcgcctccttcgtagtcagagccggctcctgcatcggtacgacgctgcctccacgcacgaaaacggggatatggcccagcggggcaggaatggtagtgttgacaccaggcttcgcgtccacggctgtctgggtgtaccagtcataccatacctcgccgtgcttaaggcccgggaagacacccctgacagaggtggcatggggagcaagcaccgggacgaccataattgaggggccgaggaggaactgcgtgtcgactgcggccagggaggggtctgtagggaattcccaggccaaggcgcgcatgacggtggagccggttgtgtgggcttcgtggaagagggtgtagaagtaggggaggattgcgtaacggatcttcatagcggatttggtggcagctgtaacggattcccagatgtagggctcttgggaaatcgcggagagggtgttgtggttacgatagaaggggaagaaggccgataattgcatccagcggttgcagagttcttcgtcggtgttgccgttaaagccgcaggcatcgacgccgaacatagggatcccgaagagggagaatgagagggcttgggggatggagaagaacatatatgcccacctagaggcattatcaccaccccagtggccagcccatttaccggagcctgcgaatgttgagcgaccgatgacgaagggacgcttcttttcatcgaccttaagcagggcatggtaggtggcgttaaggatttggtgtccgaagaggttgtgcacatcgtactcttggacgccatcggagtgagtggcattaggggacacggcgtgtgagctgaggtcgtggccgtcctgatcatggttgatcacatatggcgggtagttgatgttgcgtactcccggagtgggtgtagtccgcaggtaagaggtggacgaagaggtagaaccgccagttgtggcggtagcagcttggctgaacgacgccgcagatgcagacgcagcctcagtcttgttgctgagctcaaacccttcgggataatcataaataacgttaccaggctctccaggcagggcaaacgcaggatgggtcgggttcattctaaggtttccagatccgcagctgccagtgcagaaggaagaaacctcgttcatatcaatccagatgccatcaatggcgactttcttgtgccagatcacgatttcgttcgcccagaaatcacctgtcttagggttgtgccagtcggggaagacagtgtagccgggccagacggcgccaatgtattcgcttccgtccggattcttcaggaagacgtcctcttggtgtccgcgggtgtaggtatcatagctggatatgaatcagcaaggttttctgcggggcaggcccaggggaacttacgtatcagaggcattcttggggttgggaatgtagatggccgcgtctataattggaatataatgacggccactgctgtgcagcttatctaggaatttttcaccatcactgtagggataacggtgttgatcattatcgaagtcacggtagccatgcatgtaatcaatgtcactcctagtcaggttagattgatttcaaccatcgcggcgagccaattttaccagatagtctcgagtgggatctcaaacttctcaaagttggatacaacttcttcaagttcagtccagttattgtaaccccagcggcactggtggaagccgaaagtaaaatactgctgcaatgccggtaagccaatggtgctcagctggtagttcttggttacacccgcttgactaggacccgagtagaaagtgagatcaatgctacctcccagggagcgccacttcaggccctcaggattcatgacgacctcctgaccgtgcgcgtttctagagaagacaccatgagagaaggaaacatagtctttagactgagcggccttgtcacttgcaacgagggtgtgatgacccttgtcgttgacctcatagtagcgggtgtccagatagaaaggatgggagccgtaaacattgctggtgaaagtagtcaggatcgaacaagcaatacaatgcaggggggacgcttttgggaatgaaacttactcatcgataggatcactaatatcggaggcataaagagtcaaagtgagattgttcaaaaggcgcagctgctggatgtgctctccgatgccatacaagttgtaatccttgggcagagaggtaacaaactcaacaaactggttttcaaacaccaagacggaatcagtcgtatcgaaaatggcatcaccggtagccttgcgggtcaccttgaaatagaaagagggctcgttcgaccaggcgatctcaagatcactatcttgctttgaagcctgacgatcggaaatggatcgaggaacgacatgctcatccaacatgaaccaagaatagttcgaagaatccagatatgtggggacgatttgaacgctgaggcggtcattggcgaggtactcaatggaaaagtccaaggagtctacgtcagttccatagacattgcacggctttccggccagcgtcaaggtagcagtcaccccacgagcagactccttgacgttggatgccttgtacccgggacaaaccgactgcgcatcgacagcttcagggtcatctatattggcgatcagctgtgcgccagcctcagcgctagcgggaatggtaaattgagtgtattttcccgaagaagtcggagaagcggcagaatgggagcccgaggctgtagaggcggatctggagaaagcaccataggccaagagccaagcaccactaagaaggttcttcacaccaaccatagtgaccacttccctactcacagattagcttggcgaccaggggagattttgtctcagatagttctggctcgttcttatacggttgctgggcgtaaccggtccgttctagggacttgcggacagggaccaggaacctgatggtatgccgtacccgggacagtttctggtgattctctgcacatactctgcttcgtggctgtctttgcgaggttcgtcagcctcaacctgacgagagctggactgtgtagaatgcggagagaagagaggtcccttacgtcgacccgacgtccactaataggactgtataacctacatgtacgacgtacaccaaagaggggtataggttcgttttagactacgttctttaagatccagatataataaaagaggtcccggagctattagaagaggcaagttccactccagaatcctatacaacaatatacataccgaagaacaagtgttagagtatgaaatcgagactgtgatgagaacaggaacaagtagagtacaatgcggataataattactccggtctgttctataatgccgatcacaatagatcatgccattgctgatgattggccagttgtccgataaatgcccgtctacaataatagtaggctacagggtacctgatcctggaatcaatatggatgcatagtctgcttacatagaaattgtagtggcggatgatattgtaatcctctatatgctatatggcaagctgcagtgagccctttctctccggtggagaaccttataactacgagatgcccggacgttcaaaggattttggagtaatttgaggacctcgggactctcgcaggaatagtattcaactggttgaagaagtttattcgaattgggcattcaactgctcaacagccccacctcgactaaactgtacaaaccatcaaactatagtgggaaaacgttgtatgcgcttcaacctcacgatatacaacacaggagcccccatttcgcactttcgggaagccgagaaggatacgagaatagaaccatgtcggcactggtaggatgcactaccctgtcgatccaaatctatactcgtatggctatatgtagaccaagcttgaagaaatcgattggatcggaaatcaacttgcgaaatgcgaagcggagatgaatgctcagggtagcctagcagtgcccactaaatactaaaatggttgaccggcaggaaaatcccgcatattcgattctagtgtccctgtcaatcaatatggagatgccaagcatagccgacttggtgccgtaatggccccgtgggtacggagtactccgtacttggccaagagggtactttgcttccggcccgagattgagatccatgcaatatcagcagaagatcataaggatatttgggggatacggagtagtgactcaatgagtcaactttcatggtgatcttggtgatcttggtgatggcttgtatcctttatagtccgaaggctgaggggtacgtagacagccagagaagtcggcccgagagaaatggccctaacccagaagcgtcgttagaatagcaatatccataaggaagccaatgcgaattaagatcaaaatatgaagcacacctgggcaattctaacgcaggggctctggcggggtttttttccttttcatcccccgcttccccaggtttgtgttttttcttttattaaaatgggccatgccaaactccccggatgaaaccatcgcacttttttttttatacctttcgaccttaacatgaactcaactctgctgagtctagtaaagacctagcaataatccaacaatgtccaccaaacagtccaagccaaaacaagcatgcgacaactgtcgccgtcgcaaaataaaatgttcccgtgaactaccatgcgacaaatgtcaacggctacttctctcctgctcgtacagcgacgtcctccgtcgcaagggccccaaatttcgcactctgtatcccctggccccgatccacccgctctcatcccgacaagaccctcccgagactaagtatcccgaggacgccggtaccggcgagattccggactaccaattcaactcgcccatttcgccaggctttataatcgcagactcgcaattcgcaggccaggacttctcggatactttttcccacctgccgcccccggacctcgtctcctctcccggctccacggactcgaccgtcgaatccgccattggttatggttatggtcatggctatgcgaggccggtcgcccgccgtctctcgccccagatactgctcgtccatgtcaatatctacctcaagtacttgttcccgattatgccggtggtccgcgcggaccagctccggttggattgccatcagcccgggcagctatctgcgcagcggtatgctcttttggcggcgctgtgtgctgctacgcatatccagttgaagctggatggggcgacgcctgtgccggatcctgcgcgtttgcagagtttcggggatgagcactcgttaatgtctggggaagagctcctttcggaggccgtgcgggcacggcgggattgcgatgttttggaagaccttaacacggaatcgcttttgacttcgttctttttgtttgcctcgtatggaaatcttgatcgccaggatcaagcttggttcttcttgtgccaggcgacctcgtttgcattcacacttgggttgcatcgcgagtcgacgtatgcagagtatgaggctgaagaggcggaggaaagacggcgtgtgttctggcttttgtttatcacggagaggtaagtggaccgatttatgaaggaccatggtttggactggagctgattagtaaattggcagaggttacgctctccagcaagcgaagccggttatgttgcgcagctctattcacaagccccaggtcctttgctcggaagatcctattttggcttatggattcatcaacctgatcaacattttcgagaatctcacaccgaacctatatgattggatgtccgccggcggtggagatgggatcttggagagaccgccaacctccgccatccaatccagcctatgcaaggctatttccctagagggagtccttgagatccagcaggttgatatcttgatcacgcaacaatggctgcagacgatgatgtggaaactatctatgagccatgccacgcaacctggttcgtgcgatgacgcagttttgccatttcacctcccagtgatggtgggtaaatccgtgatgagcgtgattggtgctgcatcacagggggctgttgatgcgcatgggattggaatggtaggtcccccagagatgaagttgcttgtttgtatactgatttggatgttataggaacaaaagctcttcgacctaggctcctctgttgctgatgtgacgagatctcttggaccaaaagccgtccatagattggctgagtcgattattgatccgaacgagttgctgtggggtatacttcacactctgtctcagattcgtggctcgccctcatacctcttccctacattactggatcgttgcagaaacgtgcttggactcgactgcaacatcacaacgggaaatttccttcctatactcggcgctgctgtgccggatcagttggcttcatggtctggccagcatgactgggattacgctgccagtgcggaggatattgatatccatgacgttgatggacaagccgagtcagctcctcatccgcatgtgccgcaggaactaggcttcgaaaattgtctcttgtgatgatgggcacgactgtattgaatttgtgatgcggtttttcttcttgtttttgtgataccaaatggagatttatagatggttgtttatgatatggaggaacaacagaattgtagaacacgatcaatgactcaatgcatcaaatccatggctattgtagttgatgtacctcgtaggtcgagaaggaagctcatactcgtgaatggcagtcaaattgtcttggcatgtttgtctcacatggaatctccaattcggtgatcagcttcatgcgacttccaaggtttctcttctcaattgctcaggctattcttcactggtatgctctctattgctttctacatccctcgtatgtctccaattaacgcttcctcgcagataattctcgggtctccgcatcgaccaaagctcattagagcaccaaaccccggagccaattctccattggacctcaaatctcacctataaccaacaccattacctacacaatggcctccctccggccccgtgccctccctctctcagtccgaaccctccgctcagccctcagctcaacaagaccctcaccaaaccacttcctctccgcacccgcatcaacccaaacccgcgcgcactcaacatcctccgtctccgccgatgaactctcccacttctccgctctcgccagctcctggtgggacccaatgggccattcccgaatcctgcacctaatgaaccccctccgtcacgaattcatcgcctcctgcctagcagaaggaacctcctcaccaagccaaaacccaagctcaacctcaaccccctccaccgcaaccctcaactacctcgacgtaggctgcgggggcggcatcttcgccgagtccctcgcacgcacaatcccactcgacccaaccggcccagccccaaccccaaccctcgccgcctcaatgaccgcaatcgacccctcaacggacctaatccaaatggcgcgcgagcacgcgcgcatggatccaaccgtccacgaacacttgcgcaccggtcgcttcaagtaccttaacacaacgctggaggatgtacttgccggcaacgctgtcactctaacgcccgcttcaagttcgactgcggcttcgaccccaaacccaagctctccctcaacccaacccgccccacaatacgacgtcgtaaccctcttcgaagtccttgagcacatcgacccgaagacctcaacacctctaagcttcctgacgaactgtctgcgcgcgctcaagcccggcgggtggctaattggatctactatttcgcggacgctgccgtcgttcatcctgaaccaggttattgccgaagcgccgtggccgattggtgttgtgccccgtgggacgcatgagtggagcaagtttgtcaaccctggtgaggttaaagggtggttgcaggaggggttgatgagggcagctgatacgggtgtttcgaggggtgggagtgcgattgcggaggggatgaggtggaagtgtgtgggtgctatttatattcctgggattgggtggaagatggtgcctgggagtgaggattgggggaattacttctgggctgttaggaaggagatttagatgattttggggatctgtatgtatctatacttgcattgctttgagctatttgtatattattcgacttattgtactccattgcatatcaatatttcataacttcatattcattaactcgtttctagtgtacgcagtacacctcgctaaatgcacataaccacccaacctattaggcacgcagtagaagaataccggcggataaccctagaccattcactccaatccaagcaaaagtaaacacaagatttccctaaccccaagctacttcttccccttccccttcctcttcttcttcggagcagacgacggctcaggcacagaaacagttccttgctcaacatcctcaccctgcccctgcaacctctgcgtgccactgataaagaacgtcaaatcgcgattctgctccgcaagatccgcattcgcagccttaagcccgtcaacctctttagcaagaccttccagccttaacatcatattccgattcatagccttctcttcctggaaccccttctcaaacgagcgcgccagggcctcgaatttctctgcttttttctccgcgcgagcgcggtcatgttcaagtgacggcagcgtctcaatcgtcataacatcatacttgtcttgtaattcctcgaggcgtgatgtggcgctggaagcgttgacttccgccacggcggcggcggcactagcctgcgatgctttgtcgacggcgcgctcgacgacctcttcaaagtatgcacgctggctttcaagctggctggttaggagatgtgtgtattcgatgctcatgttttctagtttctcgcgggggacggcgtcgccccagtctggtggatcgagggcgctgtagtctgctgcgggtagctcgagaagcttgccatctgttttgttttggatgatgcggtggacataggcgtcgcctacatagtcccatacgcgctgggaggtgaggtccatagagaaggcgtgggctgtttctttccagtgggcgaaggcgtgggcattgtcatagcggccgcagccgatcgtgccgcagattagacaggcccagaggttttcttctgagtggcagacgctgcattctagaggttcttcgtctggtttgagcgaggcgttgcttttgcggtagtcgtctggtgtgtatcggcatacggggcagccggtgcctttccacttttggagacaggtgcagtggaagacatgttggcagtttatcgtcaggagccctgtggtttcgtccatccgctctaggcagacgggacaagttggtagttcgattagagcaggtgtaggtggtgcaagaggtttcccggtgagagttgcttgtccagtagaggataccgggggccgagagggggttgagaggttagagacagcgccattctcagcggatggtgttccggcatccacaacttggatttcgaccgtcttcacaaaaacaacatggcaggtctcgggctcgatgctattaaaaacacgcccattccattccttctgccattccttcgccttccgcccattccggaacttcatcagaaccatataccgattcgcacgcgccgtcctgatcatccgaaagtgactaacatcgtccatagtcttctgtccaataaaccccaaaaagtccggcggcgacagataagacggcacagcgagaatacatagtgtcgtacaatcctcatcagggctgtgtgcagtggaagaacttgtctcaggaaacggatattccgcaagacccttcgtcccggattgtttaatatccgccgcaccggtcagaccctgcctcaacgtagcttgctgctcaccgggctggcgggcggcagctgaggagcccttcagataggcggggtactcatcgtcatttccgaggtaggacgtctcttgagagtcgcggtacaggtgtacaattccccagacgctgtcggcaagctcgtaatcgagtgggatatactggccttttgtatggagaccccctagaatgtcagtgccgatgcctgcagcgacgaggttctctggttccgtggtgggtgcggagccgcgcttcgaggtgcgtttgggcggattctttggggtgaccatgtcaatgcactcgatgcagatggcgccaaagcgcttgtcgtcttcaagttgggtggtgctagttgagaagccagtggaggggccgttagagtcgtgagaagtgctggcggaggaaatggttcgcggtggggtgcttgcggtgttggtggggaaggtggatatgggtttatttcgatgcgccaaagtatggcctgggttttgtggggtttgattatcccctgcgggtgatgggcggttggagggtgaaggccggctccgttgttggaatggttggagagcttcccatgcggattgtagcgccagagaggatccctgcgagctcggcgcgtcagattggctgtgggagaggagttgcaagctaaagtggtagaagtaagcgggcattccgggtgatggctcgcatcctctggagcttgcgactggtggttggaactatcaaaagaggaagtcgtgttatcacgataaggatgcatgattacttaatattttattgtcgcccgcttcgacgccttccgccacaattggttcctggcacgcgagagtggcaaagaggcaaaaacattgagattctgaggcgcgttctggttgggaaggtgaggtggcgagaaccggtgtggttgaacgaaattgcccagatgagccacttacacgccccggggggcttgcatgtgtccagtgcccgggtgtgatgccggaggcttaaagatgtttgtgttgataacctttatcatactatgtcaatttctgtcaattaacactatccacctacaactacattataatgaaatgatatgctaggtaaagactagcaaatattgctagagtgaattgtagagaactatctatcacatagccgtgatgataatgtgggcaagtaaaagagagaagccgtcctcgggaaacattgcaagaaaagaagcctcagcctcgaaaaccgaccaaacgccatgcaggtcatgtagaacctatcgaagttgagaaaacagaatcgtaaatcaattactggccgccacgcagacgcaacaccaggtgcagggtgctctccttctggatgttgtagtccgaaagagtacgtccgtcctccagctgcttaccagcgaagataagacgctgctggtcagggggaataccctccttgtcctggatcttgctcttaacgttgtcgatagtgtctgagctctcgacctctagcgtgatagtctttccggtcagagtcttgacaaagatctgcataccaccacgaagacggaggacaaggtggagggtggattccttctggatgttgtagtcggagagtgtacggccatcttcaagctgcttgcctgcgaagatgagacgctgttgatcgggaggaatgccctccttatcttggatcttggacttcacattatcgatagtgtcggatgactcgacctcaagtgtaatagttttgccagtgagcgtcttgacgaaaatctgcataccaccacgtagacggagaaccaagtgtagagtggactctttctggatgttgtagtcggacagagtacgaccgtcctccaactgcttgccggcgaaaataagacgctgctggtcggggggaatgccctccttgtcctgaatcttggacttaacgttgtcgatggtgtcagatgactcaacctcgagagtgatagtctttccggtcagggtcttgacgactgtggcaaatgttagtaaaaagaaaatggggccgtgagagaaggaaacacgtacaaatctgcatgccgccacggaggcgaagaaccaagtggagagtagactccttctggatgttgtagtcggacagagtacgaccgtcctccagctgcttgccggcgaagatcaaacgctgttggtcaggagggataccctccttgtcctggatcttcgacttgacgttgtcgatggtatcgctggactcaacctcaagggtgatggtcttgccagtgactagagagaggaatgttagcaaggatgtccatgggctaagtggcgagaggaggtcgtctctcggcgtcggagccaggtaaggggataaacgtacgagtcttgacaaagatctgcatgatgggctttattatttgagattgatttgaaaggaaggatgctcaagtgtgaagcgagctgtggagaatggtggattgaaagaagggagaaagtggaagaggggaaacagcgtccttatgtaggaaaccttggaaggatgagggggcgaggtgtcttagtcaggcccaggtgacgccgtgaaaatgccagaagatgccggatgagtcaaatgggggggtgcctgggaacagcccatcacttcacttgacgccacctggaaaactccgaaacttatatatcattggatatggcctacaaatagactattattaacattattaagattccatgatcttccactgttctatatgttttcctatattttcctacattttcctacatcttcctatatccatcaagtcccctttgtccaagtgatgacgttatgttgcttatcgccaaaagagggggtgggaccttaaaatggagacgctagtgactagaaagtacagggtacggggctgtacgcggcaactgctgcggtctcccgggtacccagtacccgcttccaaacttagtatcaaagtcggatccgggttcaccgctgtcttttctttctttttaatagttcaatagttaatcaataatgagatatgaaaaaataaaaattcaagttttagagttaaaaactatcgagatatagagcataaagcccggtatgaacaaaacgctttcgcaaatatccctcccgacgcttttccccggcaagaagatatgcgtcaaccaccacaaagaatgtgagggttcagggataagacagcctgcacaccctttctcagggccctgttctaacttgaattgttggcctgtttcgtggcgggtgccaggtgccaacaaaatgaaaacaaaacaatagaaacaccttcggccgtacacggtcatgacattcgtgatcctcgttcatcgctggagacaaagctatgcgaagaaaggtatacaccaaagacaagagcaaaaaaataccaaaaaataccaataataaagggtaaaaaaatgaaaaggtaaatatgacaaaagacaagaccaaaaagaaaaaaaaaaaaaaagcaacacggctcataaaaggctagatcaaaagaaagtcggttcgctcggaacaacaatacaaaaaaagggtagaacctcgctgggagggggacccgtcggattcttcgtcaaaagagcggaaatagatgcgctcgcacatcgtcacgacaatgattcgcatattctcgttatcatttagcattcaaaacgaaatcgcggaactgtactcgctggaaacgatagtcgtggtaatatcatcatcataatgcgtttgcgcatcggggttgttgtctagttggcgcgaatgaccagtcgcgacacaaacttatttgaaaggcaatcgaagtcgccacgattgaatttcgtgcaactgcggctgcggaggtaggtttctgaagggtggagttagtttcggatatcaaactggaacattgggaagagcttgtctcttttgtctcttaccatgttgctcgacatgttggcggacttcagtcatggtgttgcagacatcctggttggagtacaacagctggtggtgcttttgcgagtcccactcggtgaacgggggcagcttctgtgagatggcctggaacagtccgacgatgacgcccaccggggtggtttccatgtccgtgcagaacttgtcgacggcagccgcgtctggtgtccggtagtggctgtcgaactgcatctcctcccacacggccagcagaatggaggccaggatgaagatggtcggccagttcttcagcttgtcgccgctgtatacactcgagtaaagtgacgacagctcctccagcacatccttctgcagctcacgccacatgctagccatggcacacttaatctggaagttgatcatgacaggggccatggtcttgccggagaacttggagcccatgttctcgatcttgccgaggaagccttcctcctcgccaataccttcgaccatggtgacatgcatggtgaggttgtaagcaaccaccagcttgagtgccttccggataacgggcagcttcgtgcggaagtaaaagcggaaggcggtcttcagcatttgcgtcaggaaaggagtgccctcgaagtaatcgtcgacgaacttctcaaaggtgccattgccgtcgatgtggcggtcaaggtaatccgacagcatcgcgtgcgagattccctccataccagcggagagtttggcagtctcgacctcgtactgtgtcggatcacgctgcattgtctcgatccagtcaacggtgaagcactgctcgtcacggacatagacctcgcgggcgttgatgggcaggatttgtccatatccgtgggtgatgaacaaagtgcgttcctggtccgagaatccggtaatgttgccgacagagaagcccatggtaatgtggcgctcataatccgccttccagtccttcatgaaatagccaatctccttgatatcaatgcgagtacatggcacctgccataaccgtgcatgcgacggttggcatcctgcacaaggctcgcccttgtcacacgtcttcttgaggaacttgcagcgcaggcaagcgcgcaacttccggatctcactggcctgttttcgctggtcgggcttcaggggaccctttctcttgccaacacgcttctcggtctcgggcttgccggtctgggactgcttgcgaaccttggtctcggcggtcttggcggcaatggggctcttgcgggacggtttccggctcggcggtgaggcagatgcttgagaagacccagccgatcgagcaggggatgttgacttcttgatcggaaccgggatcggccgtaccattccgacggggctgacggcggaaggcgaacaagaccctggcgaagactggtcacgaaggacaactgcgctgcttgtcggggaggtaccgtggattccaatggagctactgtggctgtaactatggctgtggttgtggctgtgagtatggctatgactatgactgtgtccgtggccatggtgactatagcaaggcaaatccatattgttctcggaaccgggagatccgatcggattcgtgatgtccacaaagctgccgtatgaggtggaatatgaagactcggaaaggctgcggtcgtgcagtgtctgggtggggttgacgaaaacaccttgttcaggataaccaaagtcgagagagcggcgatggtcgatagtactccagccgttgtcgctgctggacagggaacggacctccagataagtgtcggtgggcgaactgctttcaaggacggggtgcggggcataagaaacatccggaagtccgttggggaacgccatcagatccgcttggaagtcctgatacgtgaatggcaccatatcgaccggagccgacatcggcagatagggaccatcgagcaagccggcgctcatctggccctggccgggcatgagatcgacgggggatgactgcatgggcatgccataactggtggtaaactggggcgctgaggacgggtcttcggaggaatatgagaggtggtggtggtggtgaggggtgtgtagtggttgaaagtgccagtcgaccatgagatttggatcctgggtcaccgactgttccagagggtgaccgccagtttgcaacggggagagaccatggccctcttctgaccgtgggggcgcctgatctaccgcgacaggccatgattgatgctgaagatagcctctggagtcgtaatcgacgccaataaggccatcatttgatatatcgacattggacatgacttttttggagtcaaaaacgaccacggggaagtaaaagagaaggggaagaaaggaccagcctggatgagaggaccttcttcagaagggtgacacaaccatgaagaagagggaaagtgaggcggtgggggggacaaagcagcggtgagcgaagaaatgcgctaggggagttgattgtggagagtggagaggctggctgatggcgtggagggaacgttgatccagtgttgagcgatgaattaatgccacgggtattagcgtgcagtagcgttgattccgctaggatttgggagggggggggggggagtaggagggattcggagaggggagagaggagatagagtcaaccctggaggtcctcttagccgggaagtcccatgatctccctatttattgaattctttcctaaatgggaaaggttgcctttttttttttttttttctcttcttttctcttaattcatatactatttcatatactatttcatataatatttcatataatatttcatataatatttcatatatctattctactattttctacctaggttctgactgagatccttactattagcaaatcacccgtgagcccgaacccggaagatcagtgggtatcactgcgtggcaataagaattggcgagatctgacatcctgttatgttcccgtatactaaatctcccaaaatatcccaaatatcccaagtatcccaaataccaaaattagttgagtccttcctaatcagatccaatcagctccccgtccaccacccgtgattcgtatctcattgaatgcgccatacctcaaaggtatttagcgggccagttcaggatgctgatgcagttgggagttccccgttggaaaataagtagctactaaataataaataataaactaagcactagtaagataactagttagggaaatagtaaaatagtaaattagtgctcggctatattgcacggactctggaaatcttgttgagccttagtatggcaaaacaaggaatcggacaggtcgacgtttttcttaaaaaaaaaaatatttcgaatacctgggcacatgcagcaagggtgtcatgtaagccaatatactgcgtgcatggcgtgagatccatcacatatatatatatgttgggtccttgtgacatgcaggagctcttcagtgagcacggagtaatactcgagatatgcatttcccacgagaaagtctgtttctaactgaatcaggatactccaggactcgaaaaggttgaaaagggaaatacagtgaaggacatgtggtgatgtcgtcaaagatggtcaaagatgcccgagagtggggaaaacaaagacttctattttacattcacattcatatctacagaacaatagtaagaacgttcaatttacctttctttgagcttcaaaatctacaaaatctacaaaatctacaaattcctcaaatccccgatgccgctcgggaaacgaaaagttcgatttccgcacgcacaaaaacccaaccgtccaacctcatcaattccaatgacttcagccatgaacccgtctgactccaaagcgcgcccggggatcccggccttgttcacgcagccgccgcccattcgcgacccgctcatcacagagaccatcgatctgcagaatgcgaccctggaaaaatgcctaccattcctgaaaggcatccacagcacccagaaggatttcaacgaccatggcgtacccgccctgcaacgtgatctccacatcagctacctttacgatgccctcgaggattatcccgaggggttcgtcgccatggacgccagccgcccgtggattgtgtactgggcgctggcgggactggccatgatgggagaagagacgactcgatttcgcgaacggtgcgtgcatgcttcaagtgtttacatccttgctttttattttcatttttattttttgaagttatttcatttccccgcctcgttcttcccccaaattgttttttactatctgtcatatatccacaggatggagacagagcctcccgaagtctggaggagatgtaccttgattggaaaggatcatctcttctgtacaacgtgaaacatggaaaaaagaaagaataccattctgaacattcctcttcttctctagtgtgatcactacgcttcggcccatgcagaaccccaccggtggctttggcggcggccatggccagacatcccacctggcgggcagttatgcagccgttctgtcgctagctatggttgggggcgaggaagcctttggattggtggaccgacacgcgatgtgagttgtcaccggcagctttctgctgcatgtgcgtcttgtgtgatcctgtgcgtctgacccagtttctggctttcccaggtggcaatggattggccggttgaagcagccagacgggggattccgtgtttgcgagggcggggaggaagatgtgcggtaagtgaaaccccaggactggagcaggcgcttgctcgtaatcccgttccccttccccaacgcaagatctgacatgtcattaatacagtggcgcatactgcgctatgactcttatctcgctacttgacctgccgctgacgcttgctccgggctctcaagcgcgggaggctggattggagagtctgacgagtggtcttcctgaatatctctcacgatgtatgagttactggtggcttggcttatagtagccttgagatgtgctgacactcgccttcaggccaaacattcgaaggaggtatctccggtagccctgggtcggaggcccatggcgcatacgccttttgtgctctggcatgtctgtctatcttgggaccccccgaggagatcttcaacaggtgcgaggcttatctagcccggaatgctctctctgattctcgtatgctaatagttcctgacagacacatggacattccgatgttagtgtcgtggttgtctgcacgccagtccgccccagaaggtggtctttccggacgaacaaataaactcgtggatggatgttatagccattgggttggtgggtgttggccattgcttgaatcttccctagagggaaagccggatagcaccgagccaccagccaacagtcttttcagccgcgaaggtttaacccgatacatccttggatgttgtcaagggaacgacggtggtctccgtgacaaaccgggcaagtatgttaactcctatccgtgacgattcttttttacacgtgcagctgaccatgacccaaggcatgtcgattcatatcacacctgctacgttatggcgggtttgagtgcggctcaaaaccatcattaccggacagactcgagtatcgcaagtaacaacttttcgtcctcattttcctggaagtcttcaccaagccgcgatccggccaatgtgttttcaaggggtgatcggctagagccaatgcaccctttgtatgtgatcccgcacagagccgcggagcaaatgcggctctggtccgaggcccagcctctctttgtctagtctggaggggcgcgacccaacaccatatcagaaaggagacacggataatgcgccacgacggatgaggtttccttcggaaagtctcgcgacaatgtagtagattgaagcagggtgtcattggtaaccagggactccgagcaagtgcattatgcatgattagtcttggatgcttgagactgcaagccccgcggtcatatcggcggtcatggcatgggagccacgaggatgatcttttcgaccgagccaaggaggatgctgtgaacgagaccgagacgcaaggggttggattcggggcccgagtatgactctacagcataggtcatagcacatggcaccaattccttagtttttgtgctggcagtttcaccgattttccgaagttcacagaaagttctttagcgcgaaggttttacttgtcccgccattctcgacgatccatatgaaatttgttcctacgatgtacatcataatgtgtttgccaccaaaatgaacaagctgcacgaggcccaagagggcaaaagtaatcgtcaataccagaatatgcggataaatccaacgcctttctccactgcaatgccagctcatcactgcgtccgatgcctgtcgagtaactcaagttcctcggcgcctgcattttcccattctccgatattggattccaattgccccctctctactttgcttacctactaggtagtttattgactatttcattgactcatagccctttcacaagcaattggcccctcttcagacgcgttctgcacaacatgaacggcccctccttggctccaatcaccatttgcagacctgcgcgtctcgatatccataagggcggcagatttaattgcgctttctctaatgcgtctgcggggtcaaaaatgaaagagatcattctgagcaaccaatgccagcgaaaaaaagtaaaaaacaacccgtgtacacagtatagtatagtatagcaccactatagcgctatttcattccaatcactccggaatactgggatccataatcttcaggtattaccttctgcaagcaggttacaaggtctcccttagtctccgagaatgtttatgtttcgatcggcgaattgcaggggtacaagcagacagctcacggtgactcccggtgcctcagactcggttcaattctactggcaaagagacatgccaacgcatcagtaaacccgccgagaaaacggcacacgaaatacatcgaacatccgtttgagttactgttacctttggttttttggggcctttctgaggtccaatgcgcttgcgtgcatctatcgtcttctgttctcttcttgtactctgtttacctggtggaagtagtctatacccggattccagatccatgccctagggtctcttttgagtttgattgtttactatactctgattatttgtttactagtactgcttattattgtttattgtatacttgactttgctttttttaaccttccatctttcaacggtgggtattagaatcttagtagtttgactttttttgtttaatagctttttcttcttcaggtcatctgcattgacaccaaatgtcttctttttcctagatctttatgcgctgtcgcaattgcaaccgtttcccttctctgttggtactgtgtacaccggccagctcacagtatgacttgggaaaggtatcaatgcaaaagccccacctgttttttagaagtaatcaagtatatggcaagcagcagctctgttcccctcattaatttgttttctttttctttttctttttcttttttttcctgttgtacggaggaggggagagtcggttctagaaaattgtatatctgtatatgggtgtggcatctttccaatattcccttcgcaatcttgatttagttctcaatttctctctactgtttttcaccctcgcgcttttcattcactcttctttgaattagacactcttgaacttcactagtattataatcgtgcttttgtttggaacgccagcacaccctccccgctactagcaaagcaaacgccattgggcatcacgatccgcatatttcctgactgcacaccagctagcagctcagcctcagccctaaacccgtctccctgcaagccagacctatccaatgtgttccaagtaattgtcgcaattcgttgcagttggacaagtggcaacgccgtcgtccgtcgcctgtctctagttttcccgtctttctcgcttccagcttgcgtctagtccaaatcccaagatgtactatatcctatacctgaccagtatgtcatccttgtcatcattctccccaccatccatcactacctcctccccaaaccatgcatgtcatataacgcgaaccaatgcccccaaacccgttcccttgccaccgtatcccaaacacccaatgcagaaaaacaaacacccaagaccttaccttacccctccatccccactccactccaaccaatcccaccactcagaacccaaaactaaccaagtccaaacccaggcctctgccgccgccgcaactggcccgaaccaatctacaacgcctacacaagcaacagcggatacacatgtaccgtgcgcgtcaacaaccgcgagtaccgaacagacggtatctgcagcaatgagacgctggcacgcgagagcgccgccatgcgcgcctacctcatctgccgcaatttctccgtcaacgacggcatgtaccccgtgggacatgagcacggcggcgctgtgcaggggatgcgcgttgccattggcgtgggacggaaacctgctcgtgaggacgatgtgctttctttggggtctgcgagtgggagtgggagtgggagtgatcggtcgcggggtgggagttggagtggaggggagtaggcctgttagggttgggactggggttgggggggtcggggggcggtggtttcgcggagggtttaattaggtcttgggggaggagggttacgatttcatgacatgacgcttacgactacgcctttttggtatgattgtgggttcttttagagggaaaatctgtgggattttgaatgtcccctgtgttttcgttgattatggtatggtgggactaatgatgattttgcatgtatctagatggtggatttatttgtcgtttgcgagtggtggttagcgatgaattctgctatgaggttgtttgattttaatagctgttgaattcagtctatgggacttgccaactagtggacaactggcgtacactactccccttcaaggtgtcggaaacaatgaccgcaacttagagcactcagtgttctagtgttactcttcctattgaatttacactattgtctgtctctaactgtacttctgttagcttacattctggactacttcaaaaatagacagcttaggaaagcgcctggcagagaaagtctgatatctaaggttatatttttagatttgagacactacaggagaagggaagtgaatagtttgggtctttctagaaaacaaacaaaatcaatacatctaggaaaccatacctatagctcaagccgaaataatcaaccctacaccacttgtatcatgttctatgtccgacttggttccaaactcaaactgagtattgcaatgcccttgcctatcccacatcaccttgaagtctctctctccctgtctggccctgttgatagtaaactttctatctaaagatattcatcaatgagctgtatccattagaagtttgtatgtcagccaggctgatgcctgcccaggtggtttgtcaggccagacctcactgtttgctaactagctatattagctagcctgagtctgtcagagaatcaatctcttccttctttctgtctctcccctctctggctattccagctcaaagtcccattccggcaagatatgcatccacgcaggatcatcggctcgcttaaatcggataaaatcgtacagacgtaagcaaagctcatcatcatctggtacatggtcccttacagtctctgggacgttagaaagatagcagcggagcgctattagaatttcgtcctcggcagattcaaagaatccgtcagggaggtatccatcaaaaacatacttgttgtggataggagcgtagattgcctcgagaatatctagaatggaagcttggtggccaattaggtcgacgataccaagtgcttcccatgcctctgtctcattctcgaaagctttccgcccagctgaggccatattggaaggtggtaagatcgaagaaggtaaatggatatggtatgctgaagtattgaattgtcagatggttagtcggaacgctgcttgattctgaatatcggaaattgacgtggaacttgacgactatttaaccgattggtacttagttagctctttgaactcgaatagaataatacaagggctttcaaccctgaatcttttgttgcattgtttgcgtctcctgtcaattctccaaagaggatatcccagaggaacaaagggaactgaagactcaaggagattcgagaaagtaaaaagccattgtttagaacaaagtaatgcttcaaagaccaaagcccgggaagctctttgttattgatacaagcacggctaataggacgggacctggaagaaataacaaaagcctgctctagtctaacatgaagagatgatccattaatgacaactacccaggattacccagtatagaaatagaattatgtcagtcatgtgtatggtacaaacccattgttagcttgcaagtcaaaaatatttgaattgtgatgataggttgttgtctgaagaatattgctgatatgggacaagaaagattgaggagccacaggcctaaagaatattgattgactaggtgggcggaagggggtttttatagatgacccctgacctcctcctggatccatcacgttgcccaagtgccttctctccgtataaacaaccccccgaccttctagatagtggacatggggttcttacataatatgtaccctaggtacctacctaggtaggtaggtagtgaaggctacagctcacagatcgatcgacatacacactactcacacccagaatggaaaatactatttccatgccggttgaataacatattgcaacacgccaaaagcggggtttcctccacttccaatcaccctaccaaaaatgaagccactagaaccacaggaacaacagttctacggtctcgcatgggagggagactttatttgttctaaccctaaatggaccgttgaacctgacattggggctataaagcagacagtacagtcgctccggccatcaagcacggttgaagtgactttcctcgttcagggtggattcaacaagatctacaacgtcagcatagatgatgaaccatttatcatgcgagtctcattgcccgtcgatccgcgttacaaagtcatgagtgaagtggtaacaatggattgggtgcgccgtatcgcaagcctcccaattcctagagttatcgctcaccaaccgtctcgagacaatctgattggatttgaatggatgctaatgaccaaaatgcccggaaagccctttggtgaaatttaccagtctctttctttcgatgcgaaggcacgcctagttaggaagcttgccgcaggctcagcttgcctttttcgaaatcaattgtgtggaattggaaacatctatggcgaatcgtctgttgttgaaaattcaacatcgagtgaagaaacatcatctactagacagctgattgataccagaatatcagatccggcaaaggaacccgccttagatagtgatagcgcacccacgagcgcgaactcgggagttggcttactgagtatccccgacaaagattcttcagaatgggctttacctcatgtgggccgcattgtttctatgcaatttttatgggattcacatatccaccaagatgtccatcgaggcccatttcgctcaagtgaggactggatcacgtctcgcctcttattcaacgaaaatgactgtcattcggctctcaataaacattcagctggagatcttgatagggacggtgaagccgaagtggaagacgctacaagaacgctgcaaatcatcgacaacctcaaatcccttcttcctctggtctttccaatgcacaaccatgacccagagccgtcaatgatattccatcatgacgtctcaaaacacaatatcctcgttgatgacaatggagaactgactggcctcctagactgggagtgtgtttcagcggtgcctttatggaaggcctgctcctatcctttgtttttggacgagaaaccacgacgctcagagcctatccctccatcccaagatgatggaggttccaatgaactgtaccttgaacagctatggctgtatgaagccactctcttacgcgatgtattcattgatgagatgcgaagactagacgcaggatgggtggaagtttttgataagagccaggtcaaaagagactttgactgtgccgtgaatgaatgtgactttgaattctctgccgcggatattaatgcatggatcaaagatatcaccgctggtataagcaatccacccaccctgctggacaggatgtattcattacctggtctccagactgaaccagtgcaacaatgattgcgttttgaattgtgatggaaggaaggccacaaacctatgagccagctcaatatccatgaccatctacaatacagagactgactaattacaatatagtgaggtcgatatctgccctgaccacaccgttgaagacctgactttgtggctgttgctccacaatttcaaggaaacgcgtacaatgtacggagtactccgtaccccgacctaaattatgttgtaattgtacaatgtaggtcaaaccaataagtgggctcttccatcatcgtacatgcaagaacaagtaatcctccctttcgttacatcaccgacctgggaagttggtcgactcttccatggaaagttgtttgtttgatgacgtcagagcttaaaccctggtaccagacactgtgccatttagtataagtagcccccttctgcttctgccattgacttcatctttcatacaatctacaaaccttcaaatcaacaaacatctgagactttcaagctcatttcaacaacctctttaacaacaacatcatggaaaccgccaaggttcgcatcatcatatatctgggtgaatgctgtcttctctgaagtactaacaccttaattttagaacgccgttaactacgtctcggagaccctccagggcggtggtgcccaggcatcaaaggaggccaacaagaatgtcgccaaggattctgatgctggcttgggcagccgagctgaagccgcaaaggatgctgttttcgacaagaaggacgaggcgtcccacaacaccaaggccgacgttaacaagggtaagatcgtcgaacccaaacaaggctgtggcatggaatcaatgctaatgatatgcagaggccgctaagcactaaacgggtgggtgctgatggaaattgaaccgctgtggaatatgagataccatttttgctagcacctaggtgctgggcagacacagctctttatgtgtataatatttgcgaatgactttatgccaatgaatgtaacttgatatgtcctgaaacttgcgcgcaatgtgcgtatgacctgctcttccctttgccttaaatcactattatatatctgtaatcgaacatttatgttgactgatatcgatcacacctaattctaatcaatatccccagaaactattagcagaaaggtgtacaactattgaacccagaaagcaacctttcaacctttttgaatcttggaaacctgggggttgactttatctgatcggatccatatgtgacgtcatatcattgtagaacaggatataattcggctgggtctcagataaacccacttgtcactttcaaacctggggtttaagttgttataattcacgtcatcggtgatcagtaactaaccaggtgacagacccgaaaataaggaggcgaaacaatttcgcccaatcctactgtgtaccgttatgctcactaaaaccctaattctacctaggtatacacacatttcgtcatcgggtggaaggaggcacttttgtacaaaaactggtcttaggctaaacttgccactctggattcgaaacgtgttcttttattttgaagtcacctgcaaaatactactgttaagaattcagaaactaaaacagaaacaatactacgctcgcgattgtcgcacaagacctcttagtgctagtctcagcaacaatgacatcgattattacttccatcaaggacctccttacctccatattcgaggtgatattctctgtggtgaagagtacgctggatacgggctatcagctactcctagcttttgccgacttcttcgccggtattcctaagatgctacagcatctgctaaagggaagcttggaagccacaggcggggtcggggcattcgtcgccagtaagtttcttatgtgtgatgattccgagaaaagtctcaagctaatgttcttgtaaaaggtaacatcgtcgttattgctcttatcgcccttggtagctatggctacctggtatatctacgccgtgagggtcgcccagtgcaggttacgaccaagaagtcgaattagggaagaatcgaattaaagatacactatgactttacgagtccccggcggaggaagatctatgcctattgtaatagttgttgagggctgcgatactgaaatactagatactactagcataggaaaatcaggaagaaactactcttgtcaagcaggccatccttatatgaagaagacgagatgacacgagtgacacagccaaagggaagagtgctacttggttatatggtgactacctctttgccctatctcgacattgaaagcggcgtcactcagattggggtctgctgtagtgggtgtcaaattgctttggaaaaggatctggggtcatctagggttcagtctaatgcttgtgttctacgggacaaagtgtactcctatgacgaattcatagaacatttacgggaatgtcgaggagctcgaaatctatggaagttggggagtcaaggggttgagttgacatcaccgatatctcggaattcgtcaagcgtggaggacacttcataagtcgagatgttatcatgtccttcaacagcgaatagcacgcggaatttctatttacgatctttctagtgagctagcgagtgatgcttagttttctgattgtaagcccggcccatggatatttacagcgcatacgggttgttaaagacagcttcgcgggacgcaaagtccagtttctacgaatgcagattcagaagaatacatcctagtcctacttttggacgcagagaatcggatctccgggtcctaaatatgatggacccttgaattgtctttgagcattagctggctatagatccaggtcatcttttggttacccactcggtttattcaagtttatgttgagctgcgggcagctaatctgtctaatcagctctcttcttgccgcgcatgatcttgcgtctttgggcaatcatgtgggtgtacaggatataagaacctagtaggtagtcagtaactgataatacaaacacctcataagaaagaacaacataccaggtacatagatcaccagaatcgcgatcaaaaggtaacggaaaagcggactcagctcgccagcaggaccaagggcctgaaagatgagtgcacactcgctagagataccaatggggtagaaaacgtagaaagtgttgtatctgttcaatgcgaaacccatcagcccgttgaacacggtagcctcgtcagaaagaaaaaaagaccaaaacttaccgcaaccaggtccaccagctaggaaccgagttcccagacaaggtaatagcaaagaatccataacggataacctccgtaattccccaagcaaaaacacaccccaggtacgcataatcacccagctgggtatcctgcccagcaccaacaatctccccaccaaactgcgccataatcccccacaccaacagcagccggctagaaacctgcatggcagtcgtcatgaagggcgcgcgcacgaggcccacaatactgtgcacaacttctaacagggcgagggtctgcgtggccagcagtagcggggagaaggtctggccgaagacctttgggagggtttggttcgatacattggctgggaggagagaggccgtgtagacgacacaggtgccccaggcgaggaggttgagggtgttgtaggtgaagaggtaggattttgttaggcctgaggagccggagcgcggggcgcttgatgttttggttgaggccatttttgaccggggtcgtttctcgtcggtctcgtgggagaattggtggtgatgttgccttggatggaggaactagaaatgttgatttggttgggaagctcgcgatcaacaaaaaaaaaagggaccgaggtcgcggttccttacgtaagcattctggaagagccctagagcccgcgaagaagctgtggagacaaagcgtgtttgggatctggggtatggcacatctttattttgttgttcattaggcttcttggtaatgcactatttattgagggtatatgagcatcgctatagattttatgttatcagtacggagtagtcgggcgctacatgctacttagccaatcacccttttaagaaagcacccatgcagtcgctttgttgttcactccgaatataatccgtagtcgaaatgtcgcatccggataaatgctctctgcaagcctggattatgcgaacaatttttagaagctctctgccgaggaacaggcttgatgtgattcgctccaggcaatcgagtacatgggccggcagcgaagcggatggcttcctatggaggagctcttggctgccagggatacaaagactagctgactccgcggtgtgaaactgcacgatctagtccagactactgcaagaggctggctgccatctcgtattgccggcagcacacatgcgtagtctggcctattctgggcttgactggtttgggtggtatgtccgaaaggctagatggacagacgggcagatatcggagggattgttgttggatgtgattgctcagattcgagatgacagcgcttaatttaaggagttactcggtgagcttagcgagggccccacgttcagcagaagtacttcaatttattgtccggttgattctccggtatgaatggaccgtgatgcatgttaattaccaaaggcgaggaactccatataatttgcatcatttgtatttggtgctacagcagccattctcatgttgtatggaaccgtgggttcacgtatgcgaactgacatcatgggctgggccactacaacatatgtcgccctgtgtatgccttaagccttttgaggagatggaaggatctgtcagcacttggggtgagaagtatacaatctgctaaataaaccttgtacagaattattagggtacaccaagtagaaacattgaagtaaacatcccggagtatgttattttgtaatttgctgtaattaacgtagccgtatattgctgtgacgctaaaatgacatcagcggctggtgtgggtggaactactaccccatcgcatgatgtcatggcaactatgccatcatctcattggtgggtaatgatagagaatgtgctagtgccaaccacttcgcgcaaaaaaataccaggggaaaggagatgcacgcccccatttctctatataaacaaagatggctgcggctcgcgatggacatattcgacctcaattgatatacggagtatatatctaacctatgttgtatacaccagtcctttcataggagaacccgaaccgtgaagctcgaccagaaaaaaagcaataaaaggaacaccaaaacacccaatcgtcaccggtgacagcatattccctcgtgtcttagcccaacaatattacccccctttcttcccctctcgagaaggggaaaaaaagagccgtggagccgtgagctcacacattggttcaactcactgttaccgactcagatggtggaatctatgcaacaagcagaacgaacaatttctgagttactggacacggtccttgagggcccagaccgactgaatcaagtcctatctgcgcacttggcccaagtcgatcgtgtttccctgctgtgagagccgggattattacgtcttaccttcttttcttgtctttttttccttttttttccctttgcggctaaaactttgctaggacagggtgttttttttttctgtttttttctgttttcaagcagtacagccatgaaaaaaaaaaggtgattctccaaagaatggccccagggacaaaaggaaaaaggccattgccatttcccccaaatgggttcccaaatgtttccacgtgtgaccgtccaaacttccaaatttcgcttgggagaagaccaaatgacgttccgtgctaggatcggcggtccgatgatgtcgtcctgctgggccctccttcccgctgccagatgggtataggagccctcttttttgcggtcagaaaacgtgtcgtttttatttatcattttgttttttttttataccctatcagtctccactaaacccgtactatccagtacacttacagcaggtcaccgagggattgtcccgttcattccgtgcattttcttcccggacccatcagttgaagaactgatgccacggtcgtactccactagactcatgaacggagcacggtggaatttgatccagagataacagtcgggactgtgtggctggaaatttaagatgataacgtacgatttaaccgagaaaaagcaagtcgaaaaagcaaagtgtactccgtacggagtacaagattgcactaatggtgtcggacgtctatagaattgctttttgagagaccttgacggaaaaagaagataatcgcgttttcaggaagaacgagtgcaattagaaaccatcgtatatactgtagctaataatataacatactatagttccagtgcaatgtttccgagttgttcaacgccaaatgagaggaacgtgggattaataccaaatattactgattttatatatccgacatacaatattcaagtgagtatgaaatgaacaaccgttgttttattttttggcaatttttcacaatttttcacaattttctctgatatcttttcccccaagacctccaattcccatctgttagtttggttcccttcggattggaattgacctacccaccttctcttcgctttctcggcccctccgatttcctctcttcccaccccccctcgtcttctttgacttcctctggtttcgtatctttttcttttttcaacgttttttttccttccttttccttttcctatttgggatctattgtctcctttttcggtacgtggtcatctccaaaactgagagggaaagaaaaatattataggtgggatggactttcctatctgcccctctctcttcgaatatcttcctattttcgctgtcttcaattccctgtcaagtggagaccctggcttttggggctgcagctcttgcgatgcgctagtccttgtttacaaggctgtgactggattaccgtccgagtatatgcgctgaatggccctgtttgttccctctagcccatataccacctccacatctggttcctctaattctttccccctccaagccctgctgtgtactacccctctattcccctcgaatcttttcttgactttccctttacccagccctggtcgctatcttgatcactcaatctggtggctgaatttcgcctcggttccagcctcttccccttggccatagacccggagccgctcatattgtcgttgacagctcccttgctaccttggttcctggatccgtaacacctgctggctttgtaagacgacatatgcgttgtgtgcagatcttgctattctgacgtccttgttgtatcatcgttgatctttacattcaagacctcacattcattgttttgccacactccatccgtccaagatctggatctgttgcatgaatctgagctgactgggatttgcaagcagatcccctcatattccatctggattggctgggcatcagaccggagaaatcgaacccatttccatcctacgattgtgacgatctgcgcattgcactaggttgctcccgcctactcctttaagcatctccttcacgcacacacacatacacatacacaaccatggcaccagccgatactaaaaaggccgagtcggtaagtactacttggcccgtgctcgaaggttcctcggcctgacatccgagtctagggcccgcccaagctctctgatcacaaggaaatcctcgacgagagcacattcgaacagatccttgagatggatgatgatgaggaggaccgcgacttcagcaagagcatcgtgtacggtttctttgaccaggccgagaacaccttcaagaagatacaaaaggaaatgtgagtgatgtcttacttgcaggaattcgcggtcattgtccttttactaatcattgcacaacagagatgacaagaaccttgctgaactctctgccctcggtcacttcctgaagggctcatcagccacactgggccttgtcaaggtcaaggagggctgcgagaagatccaaaacttcggcgcccacaaggatgagacaggtcttattgacgaaccggacacggagacctgcctcaaggccatcaaaaagactctggatgaagtcaaggtcgaatatcgcaaggtcgagaagctcctccgccgatactacggcgaggaggtgaaggacgaagaagagaagccagaagagaaggaagtcaaggaggaggagaagaaggaagaaaagcccaaggaagagcccaagaaggaggctaccgagtccaagaaggctaccgagtccaaggagactaaggagcccaaggaagcctcgaaataagcggtcatgcggactggttgatatccctccctcccctttttctttttagcgacggatggagcatggcaaatggctttttctttttcatttcccccctttgccctttttcactcactccctcttatcatcccttccgaccctggcttttctggctttcttgacacgtacataacaacctccaccatatctccccctcccgcccggacactggtgtggaaacggatattcctggtctgtcacgtaggtgcaggcgcgagaatcgtgacgattccgaggagtcttgaacaatagcgacatacggaaatccgagtgcctctgtcaggccctgttttctcttaacctacgccttttccaaggttgtttcgtgggtcgtatagtaagcattgcgtcagtcagtattgaagtacgtgtaacgcgagaagtaggcacagggacgtcagaagtaagaagtatacatatgtagccaaagtaatcagccaatgtgcctgaatagtttgagcaaggttaagtatttcctgagaatcagctaactccaaaccgagaagtggcgctctaaaaagctttttaccttcagccacttgcgtgggcctctggggtccccccggataaccttggaagcttgactcaaccttggaactttatactttgcccgatgcgggatagtcgacttagtctcggatatcttgtcttccatcgttcctcgataggttgtgttaatctgctagacctgccgtgacattcagcagagggtaagtctgttcactcttactctccttcccatgcccgattcactcggctgtctatctatcgtccaaagatcggacagcatcgctccaaataggtggaactcattaactggtgagatccgatctaatcgaaagttctggtgtgtgtgtgtgtgtgcgcgcgcttgatcaaggcaacatatccattcttccactattcaccccaactgacagcaaatcctgcacatttgcatctgcatccgcatccgctcttgcatggctaatggcgaatggtaaacgggcaccgggggcctgcagtatggagatggtgcgacgccggcgactttcaacggcgcgctcacatattgctgaagctgagattttgctggtttgactagcttgagttattgcacgctctgtaaatcctaagtcccacaaagtgccccagagagcgctattcttttccaagtcacggtttaatacggcagatgcagatactcctcatatctccttgatctggtcatcccagccaaagctcgatctctcaacagtccgtgccagtatgcaatgcggcgggattatgcagtgagattcaaatcgcgatggagagataatccgccttggttggccctcatcttgtgcacaatgtgacatccgttctttaatcggtgcgccaacgaggagaagctccgtggagccggatattgcacggcagggcctcctgtcagtatttacgcgtcgctttcctcctcatgatatatctagttgctctagtcgccacttgctagtcgccaaactagccttcggtacatataccagctgcaggtgtatcttcaaccatatcgagttacaaaggcactttgtcgctcggagtccgctcaaaatgatagatgccaatccaaacaatctgccgtactcgttgccacgttgctcgtcttcaaccatcctcccattgcatatgcacccatcgcaaacgagagattgaatcgagtcaggccatctgccaaccggaacccctttccccgcaacgggacgcaagtacgcgctcaactccaagagccgatacagatgcaagcaacagcaccgattcgggttcaggtctgtcgaaattgtgcttaattgcatcctggcccggactccggcctggcaggtcacacaagataaccaacgagcgttgcttttctgcaggatgcccgcaagccgacgggtaggcacatgtgccttatttggctttattcccggctagcaagggtggcttgaatatttcgcttgttattgggttgggtttcagtgggcctcgacggcgggttcgagatgcacggtctgattctcctggctcgctccacacagtggatgtcttcagtcgagaatgggtctttccggatctggttctgttgagctaaagctgtcgacttccttaacggcggatgcgtacaggtgagtggaaacgagattagcatccagagatactagctttctctgtggattacctgcctattactaggtcggatggggacctcgacgtggatccggtagtgtgtactccgggcagtgtacattatacaaattggcctagaaaacacacccctttctcatgcatgcaagcatacatatctctacccgtctgtctcggatagcgaacctgagctcagtaagtcgccctcgatataccaaaaccaaaccacttagcctgccatctttgcgctcagtcctcgatcccgagttctgggtccacgatgactctgtttgcgattgtctcggtttattcgacttgtcaccttggctcgcaatacgtttttcttttcttttcgaaagggtgagtgataggtagagggtaggaataggaggctctgtactacttccctctccttttcttctttcccctccctctcttctataatagtaaacgcgctctcgtttgccatatcgaagcttcatgcccccagcctacttcccacagagaaagaccgtagtacaacgccgtagccctattcgttagattccggcccccaacggtttactcaccctgcacacgccaatccactaaaaatgaagtactccagcccggaccgcatttgacgtagtccggggttgtatatcaacgggtgtgcagtgatcacccacacgcacattgtacatgtaccacccgactccacaaatcctgcaagaagtacagtagcgtctaatccaagcgagagaatcgtaagcgcggagagacaaaaaatcacggaataaccaaaaagaatacctcaactgcaacactggcctcgtgccctccctttttatcttctttgttggtcatgcatgcacaaaagaaacaataataatctttatttgcagatggggggttagaggtattgtcttagcctcgaagtacctcccttagatccctgctctgctccgggtccttgggcttgtgctatatcgatttgattgcaggttcgtcctttgccccatttccccaattccccgcttggtctgattgcgcctgtttctgtctcttgtcttgctgtccgttcgctctgcttcattccggcatagacgtctctgattgtatcggcaccgcggcttcggcgccatgcaattcgcagccaacgaccgttagatgggtttccgcgccattgagatctgtttgaatgggaggggaaagggatataaagcctggcgatggcacgggctgtgagtttagttcttcaactttgaaattcatattcatattcgcagatcgttttctttgtcttgatttcacggctgatatacaagcttgattctactcttcgatcacattgaatatatccctccatccaatcgaagaatattgaatccaacaaaatgcctgtcggacctcgagtatccaaagaagaattcatgcatgcattgggcctaaacccacaggatccgcatcatgagcaatactaccgcgccatgcgagtaagtgtgccagccgaatctttaacacttaccttcttcccttatattcctctccctctcccatctcccatatacaaatacaccacagatattcgaaggactctctaaccccaccccaggatgaagcaattattgtctacaaccgcatgaacgccgatacctccaacctgctggacaacgtgcgcgccgacccagcaacacggccccccttcttctggcaccatatccgcccggactgccagcgctgggggatcctcgagatctgtcacaatgcgccgccactcgtgcgcggcttgttcgagcgcggggcgacgaatggcgaatacgggccgaattgggtcgctgggtggttgttgtatagtgtttttcggtctcgggatgtgaggaataatcggaataggaggaagggggaggttgggggtgctggttcggagtctggtatgtattacaccttctttttggctgcttccaggtctattggtgaaggtggtgctgatatatgggtatagataaacgtacgaggccggaggagacgacacagccgaagaagtactacgatcctgtgcgcaatggcacgctgtgattttttggaattgaaggtgttttctagggttttgctttttgtgctctgctttttgcttcatatccatgctgtttaatatcttattgtataattgaagtatgaaactcttaagactatcgatgcaatgcaaaatacatgcatctaggtagaatggcaagtagatcgaaacaatcaatcgtcatcctcgtctttcttatcgcctgaatccttcttcttctcatgctttccacgttctgacttcaagacctccgtcacacgcttgtcgtgctcgtcagcccgctcattccactcagcatcatactcagccgcgatattcttaatctccctacgaagcgagttcccctcatcaatcaaggactcccagagctgcaaatcaacctgatgcaactgataaagcttcttctgcctcgcactgatcgtaaaatccagcgcagacttgtaagaaatctcccgattgtgatacaaaaaccacaagtaaccccccatcaaggtagacaaactgaccaagtaagtcactggctccatagtatcccacccgagagaagtcccaaatgtcaacttataaaccgtaaaccaccaaatggtaagaatcccaaatccgccaatcgcaacccgctgcgcaccccgatgcgccagcgcatcacactcctctttcacattcgccatggcctggatgcgtcgcgagagcttgcgcaatcgcatgcgcaggtaatacgtgcgctcgttgaacgacggcaccgtgacgcggagctggcttagaccggacggcgcaccttcgatagacacgataaactcgcctgcgcgcgctgcatcccggatgaagtcgcctatctctgtggcttgtgaccagcgcacgaagcgctcgggttcgccgtctcggggcggaccgccgttcgttttgcgggggtaactgtaggtttcggcgtcttcttctcgggatcggcggtgctgagtcggtgagcggccgttgaggggtttgctgccgccaacgccgtcgttgccggggacgaagtctgtttctttgttttggttttgcttcccttgtaggtcgatctcgtcttcgattcgttttttgggcttgatggcgttgtcgtcgcgctggagtgcgatgaaggagatggctggtgggcgaagattgccagtgttgcctttgattgggggtagctctgactggattagacgctctaggtatgatagtggttgttggggatggacaaggatagctatgggttcgatttctaatctggcagttagcataatggtccaaagaattatgttgtaggtcgacatacctttatcatggtcttcatttatgatggtcgttaaaggaatgatcagtttgaaaagccgcgatggcgtcgtcaacattttacctatttccaaaagtcagcattgatacttaaccaatgataccaacactttcttacccttggtcatcctttcaggccacttttccccttccatcggagacttccccccttcgccattctccccaggagctgcccgctgaggccaagctgcttgactgccctcctgaacttcaaacttctccagaagctcttcagtcttctgcttgtcgcctcggagttgtgtatggtctgcactgctgaatttccttgcctggatccaggcatgatggtctcgtggaactgcagtcagcccagcatacagcttcgttgccggtgatgcaccagaagctccgagaccaatacccctgccgaggtgcctccccgagaatgaacggatatgtctagatgagccgacagagtgattcccagcccagcaattgagccccgccgaaccaatccttcttaacgaggagtacggggcactgcattgtgatagtgatatcctccctgtcgccgccgacaacacaggggcgcaattccgtgccggaagatgcattttaaaaaggaaaggtctttttgtcctcccaattggttattgtgtatgttcacgtcgcatgtaaaatgggagggaatatgtagactgtaggaattgaataaggttgtattcgcgtaggagactaaggcatgacgaagcggcgtttttgagcacacgtgtggagaatggggaatatgatgtaggggtctaagagtccaagcaagaagccaggataatgcacgtacaaaaacacagctcattttccaagcttgtcaagttggcctggaatatcctgacgtcagagatgtgcacggatcggatcggcactttgggtgtggctcggtttgtggcagtgctggatctatatctcatttaggtaccttgtcatgtctttttgaatgtttcttttagagtatgctgcccaagtctacgagtggagtgcagtatgattattcaatatccttcaatatctagattagaatctatgtagagtaaccagcaatctcagagctcacgcatgatatcttgcacggccttcgcagcaaatcgtttccgttcgccctccggaagctcagagctcatatctaatagtcaaagttagtaccaaagtcaactatagcgagccaaggaatcaagaatcatacctttcattgcctgcatgcgcatcattaatgcctccatgctctcgacatcaatctcatcctcgccatcatcatgatcagagtcatctctctcatcgccatcgcctcctccacgctcaattgccattcgcaaaccgaacatttcgcgctctaattcatggacctcatcaccaaacccacgagagctaccaagacctaatagttggtcttgaagatcatcctcagaatccatatcaggatcatctccgtcaaagccagagttatctccagccatagaccagtcatgagtctcaagaacctcttttatacgaggcataccttcacgttctagtaatggcataaagtcagctaaagtccaaaaccttgccacccaaccaatcagaaaaccttgcttggtaaactcacccccatattgattcctcgtctcaacctccgaattctccttaggatcccactcaacaacctcccaccccaacagccccatatcaaagaactgatcctcccaccacccaaccgaaaacggcacagtctcacccccacctaaatccccatcgtcaacaccaagccccagatctgcatcgggatccttggatccttgctgacgcgcacccacacccgcagcacccttcctccccccaatcaacacaaacacaccaggaacatcaccgagtccgccgcgctcctcgtcaatgcgctccttgacagcgccaataccgcgcatcaggtcgcgcagtgcgcgcacgtcgggccgctccgcggggtctgtgtctgtattggagcccgggggaggtgtcatatcgctaggagtgtgcgcgcagacgacgagagctccaacagcttcgcgaacaatctcggcttctgagcttaggaagtcggttttccattgctcggctgttggggttggtgtcgagctaggctggggatctgtgccgtgaatggcaagtggaatctcgtcaacccagacgggaacttctgttgtgtagtattttgtttcgagccgaagagggctgtgggttgtatagccggcgaaggtgcttgtcggtggtgggggtattgagcttgaggttggtgaaggggctggctgctgtggcgggtcgaggacgggcacgccggttagggagtgtaggagcggcggaattattgcgagggattgggaggttggtgtgagaattaggagacggcgcggattggagatattcttcactttggacttcgcggagcttgcggggttggatgcgggcgctgaatgggtcatgatggcggtttttctggggacaattgggagtttgagattattcttaggagacttaagtcaggtggtgcccggtccagtccattggtagtgtttagtcggagaagacagtgtattgaggaggctaactctcccccgcatggacaaaaaacaagtggatagataatatgaccggataatgcctgactcggactttcccattttggggctcaaatcttgccgctttttgatccctgcgtaaaaatgagaacacccgacttggtcacgggacattagataatcaaagtgtgcttccaccaaggtttgatgtataaatctacaccaccgtttcaaggccagtcaccctggcttcggtattctattctggaggataatatgatgctatgaaaagaccgttctgagatgaacagtaggcccgcaggatccatacgattactacataagattagggagtgtttcgtcgtgtatgaaatgtccattctattgctcaaatgactccaatccgatatctaattaacattcttctgctcgactcataaatttatgcttcccagcaacgctcttcacatgagacctaccgagttccaagcattaatccgcaccgacgttaacagcaaatttgctgtatttccgaattctcggcccatacacataaagcaagtacgggattgcggccatggcagtactgatggcccccaagatggtcagcgtgtaatgaacaccgatagaacggtaaataggtccaccagcaaccgtcatgccgcctgcaaccacatatctggtaaaaacaaggaaccccaatgcagatgctgagtatacaccataggaatctatgatatacatgtacgcggagacgaaaatagcagtaattccgtatccgaatacggcggatgcaatgagaggagaccaaatcgagatggatggctgaacatcggcatcgagagtgaaagtcagcgaatgaaacaataatgaaccagtggtgggcaatggtacttacatagctggtccaacccatccagaacaaacttattggcactgctggagcaccacccagcatggcataccacagtcgcatttcaggagcaatactagaagtcttcttgtactctttggcagtccaagagtatactaccggaaccaagaagctaacaagaagaattccacatagcatcccaacccagagtatgctagtcatctgctgtgaaagcccatatgtatgaccaaaaacgtatgtatatccctccaggaaggtgaagaggacaatatagacaacggtaaggtagagcgacatcaagatgataatcagctcagagtaaaccagcgcaaatggccgatacaccgaggccagcagtcgcgggcccagagcctcgtttttcatctccatcggagctttgtatctcttgtccccagtttcttcacggaggatctttgctttccaatacagaaggagaggtccgtatgtttctggctggaagagaagaacgatgacaagaatcgcacctcccataataagcattatccactcaagccaacgccatcctagattaacaggaatataactgcctattatctgcccggccatcggtcccagaaatgatggaatagcataggctggaaaagcgtatgtcttttgtactggattccacaaatcagctactgtacctccggcgcagctgagtggagtagagccaaagaaaccagcgagaaaacgaaagatcaggtggctgtgaatgtttggggcgagtcccgcggccatgataaaaatcagaaaaaggaccatagttatcaggtagacggcgttccggccaaatgtctcggagaatgggcctgaaaggagggagccgctcccaaaaccgaccagaaatagagctattggcacagtcagcttgtggaaaggtgatagtcatcttagaggcctgtacttacctgtcgcaagagatccgactacttcggatacgttgaagtcttcactgtattgtaggataccgcaagcatcaatcgccgatgtggcggttacggaaaaagcaagcaaagagactagaaaggtcataaacaattttcgcgacacgctctgacttgcaggattcaaaggatcatcttgaccatcccagtccacaatgataggggaatcgatgggagatttttcctggagcgagaactgcttcggcggaatagaaagccaaacattgcttgactgacagctgtataattgaatatgagcatggattgcaagatatatatctgcaaggcttcgttgagctatcacttacgtcgagctatgtggtgacccgggtgtataggtctcacagctgcatttttctttgatttccgctagttgcccacgaacagctcgtcggatacgttgatattgaaagagagattccattgcagggaaataccagaagaccggcaatgaagattgtggaaggaaaaggcccgggtagtttgcgattatacagccataaggatttttaactatatttgagctgtaaagataccggctttaaggctttacgcgtctttttttttttttcattttttcatttttcttctctcaatgataatatggctgtggatcgtggcctagctccaccgataaatcaattttgtccacttgcaccagcaaagtccgaatggatttgatcttcgcatcggacataggtgggaaccgccacacttttctccgatagattgtacttcaatcccggccctaaatagtttcgtccgaattgcatcggacttccatcacccactacttctccgtctgatcaagttcttgatgatattatatatagaatctgatgacctgtggaatggaccaaaatgacacatcctccacttctgacttcaacagttgttcccccaatttccactcgagaccttttccttaggtttttggtatagtagctaatgtcggggggtaatattttaacaaagcgatatacctgggtataaccgacggtagtttgcagagctctcaatctccttaggggtaggttgaactaaactgctatctagcatttaatccagctaacaagtgccttttcttgaattggactgagcgttttggtaagatcggtacgatcggaatgagttttgcgaccgtgaatgcgtacaatgtcgagtacaaaactgagaattctcgtgcacggccttttgaattccaccttctgaattttgggcttttttaggcatcgtattgtggtataaaaatgggtaggaaggtgatgcaaaaatgaccaccgggtggtaagacggccaactagttatatcatactgacctagtcaggtagcaacgtattattagctatatagttatatatctcctaaggaaagcctgcattttatcatgccattaccctaaaatttgccttttatcgccatcatgttctacgaagacgtgctccctcctaccccaaaatacgagtttaagggagtgcaggattgtcttcagattttagatcaggaagtagagaaatatgaagggaataggtattcatctaacccttatattatttttattgtggatgagcgtaccttcttcgattgttttgagaaccccaaacaaagagaaaaactactcgcaacatcagtcaaagcctacgaaccttctaccaaccacttgcttctcgagatggagtcccctgcccatgcagcagcgcgccgagcgtttgaaagaatattcgaccgttggataggagtcgtctcctgcgagattagggccgatggcagcccgatgaattatagagggcctgggggtaagaacaaaaagccagattcagcattcactccgatccgctcaatcctgaacagacactggccgacagtcgtcctcgaagtcagatatgccgagactcggagcgaccttgaaaacgatgttaaattctggttgatccaagctgcgcagaatgtcaacgttgttatttctgtcgaaatattcgagcctgctggaagggtctccatgaaacagtggaagatgggagaggccactaagcgtccgttcccttgtcaacagatggagttcgtgcgaaagcctgctccaaaaacggagcaggtcaccggaagcctccgggtaccattcgaagatgtctatcttcgaccaaagaaagacggggagactgactgggtcgtcaccgcctcggacctcgattttatcgccgaaatggtctggtctgtgctctaagctgacacagggattcgacgagctcatctcctgtgttgccgcagtgaaccctagaacggtggtcgtcctcaacaacgccgatccagttctgatgccatggttagaccaggtctcctctgttctgtggatgggcaatcctggccaagaaggcggccgtgctacagcagcgctgctctttggggaccacaaccctgagggcagactacctctcacgtatccgagctcagttgatgccaccgtcaccagaaacccggcgtatccggagcgcatgaatacggaaaccgggaccgctttgttttccgaggggatgaactcagcttatcggtggtatctcagcaccaatacaagtatcctcttcccattcgggtttggaaaatcatacactcgtttcgagtacaaaaacctcagaatcgaaagagatcggggatccagcttcaaggtttctgttgatatcaccaataccggctcccgcactggggtggacgttcccagtccacatcggacttcctcaagatgcaagctccgaataccccggggtgcagtttgctgttttgacccttgtcggatttaatgacgtggaaattacgccaggggctactagaacagctacattcgaggtcactaaaaaacagctcagcttctggcgtcaaagtgataggacttggaacctggcccgcggtaaacgtgatatttggattggctctgacactgaaaccaaattactggaaggcaaactagatatctagaaggcataatagcataattgttgacatacatgggatgcgtttgtctctgtgcagactgagcatttgcctagtttgtctcgtttgccattctcggaggcttcatatacagcctcctgtccatagattcatcatcacactttactttctccttcatatccctggtagcatgtagccctcaagaataataagagacaaggtctcaatagtattctggtttacacatagagaaactcctgtccagcaatcaacttactcccccgctggatcatgtcctctagtaatttagagtcaagaacatgtgtcaggtgaaatacgtgaaagtattagattgacttgtaaaacaacctttgtagagatttccagtgcatagtcctacttgcagcatagtactccaaagtgcccaggtgggagaaagcagtaaagtaagccaattatagtggtgttgggaggaacctctatgccatgtccattgatggctggcagacgctattcaacattttggtatgatcgagctgggtagaaaatctcaagacgttatttgtcttgttaaacaagtacaagacaaaacaacagagaggcaaaactaaccttggacggcaattcacagtcagtttataaggccaatgcttggtgctctcgatgcaggctacggcactcagcaaatattctggaattcattggtcggacgcagcaaaggaacgattagttgcatgttgctatttaatattctctctgtccataactttgttattttaaggactacccacgtctaatggaaatgtaacgtcaaactacaggaatattgccaacgttatccaagttctaaacaagttagtctcaagtcaagaaatcacagattgcatgtcttacccagttgaaaagatccgccccaaaccattcccgcatatcagtccagtcttcgattgtgctctcgcaccgaggtcccgaattcggtagttgctggttttcaacgccgaactgagttctagaaaaggtcattgagccgaacttgtcatcacgatgaggtataacttactgtaattgaagaagtaagcgatgtgccttcaaacatatggcgcttcgacgagaaaggttctccattcgaagtacgagcttgttcaactcttcccgatacaagcctgactcaaaagacggtgacatatctaaaaggcacgagttaagagccactgcagcatgaagtgcctttaggcttgtaacacctctaagtaaccagagatagggtcgaagaagtggaacttcgtagatctgacgatggatgcctattaaggcggcactggaagctatacacctctccctggatgtggcaaggaagtgtggtgaccgagaatggcgaaaaggacgatgtagaagaaggtaaagttgatgtgcgtaggtttgtagaatgcaccaatatgcgtaactggagtctaatatgtttggagcaccatccactaaatatgccgagtcccatctctgttgttcctcggcgattgttgcatcaaattcgttcaatggctctatctcaagtcgcgagggaccagatatgtggtgacagatctgcgtggagatccggaaaagctggactttgaacatcatcacggacatctgtgtgggtgcactagatggtcgcgagatcccctcttgcgtaatatcagcatcgttgacatccgcgggcattgtggtctttatatcaagtaggaatgacatgtcgatatcccgaaagagaatggcttggtaagtatgtagcgtcaagataccaacccagcagcgtcgacgtctctcagtctcgagatggttaagtccctgggaatcaacattgcaccgtagggctatgccgatgtttaacgccatacccaacaatgcccatccttgatcgacagactcattatgggaaagattatatatcaccatcagcaaggcctcgaatgtgctgagtttatgtcggataaaaaattgatcttgtgaaaggcagaccatcgcagtttgctgaagccgacgggacaaagccacagcctcttgctccttggagtcagacccttttggccataaatcaaccagtctgggatcactgggctccatagtatttagtgtcaaagagcacatggaaaatagtaaagccagccaagagagatcaacttcatagggatgttgcatgaaggcaacatactgcttctggaatgttgggccatgtagaatggggaacagagccgagatgtgattgaaaaaatgagaaaccaagcagtcgcagatggttcgagagggtaaaatgccgatgatatcttgcagcgagatactagggccaattgaaaagggagacaaagtatcagttgctgctacagcatcatgctccggaaacgggcgttgaagaaccgcttcccagcggctatcctgggaatcttgaattccatcgggccccggccgctcaggtcgatcatccaaacaagcaagatgttgtctcaatggggccaagggagcggcgaacgtgttcctggttggcacatttgacgatgaaggattagacgttgttggatgatcgttaatggacccggtcacaacactgggggtggtcaagaacgagcaagacggcgcgcatcctcgccgcgtacatgcagcgcaaggctgtttacgatcacactttaatttggagcatcggcactgctcacaactaagaacttttcgctttcggcgatgagatctcggactttgcgctcgactccgaccccggccccgcccgtcgtgggttgaggggctttgactcatcgtattgcagtatttacctcgtacacggagttggatgtccggcacgcataaagataaatcgacaaggttttcggagaaaggaacagtgagaacagtgacgtgacgaatatcggagttagaggtgttcggagaaaacctaacatctccgacgacactgcttactaaccttttgaggcttcggagttcttcggatttacccaggtggtttatcggagtctgtctaagcgctatgtcttcccgaggtcagcacgaagtatataagcgctactatgctcgcaatagctctaagtgtaacctacttcggattagacatatgaaggtatgcatacatagatatagatttgaatgctatgtagtagtgctagagcaggccactaagctttgactaggcaggctagagctctcgtctaggaagaccagatcgtcggagtggctgctattgctatttgggacttctgttgctctactcttcgcggcttgtgggagacggataatcacgtgatatccaaactttagcccgaacctgagcgtcctcataaaagcggcagcttatatggatgtagtacttccaaatttgaatttctaagctcatagccgatgtgtgctcttatcttttgcttatagacattgagcagctagattatattagtgtacaatatacctgaaaactcttgctacgcataatatggtccttggacatgagcctcgaatcaatatcaatctcggatgggggtctgatgggggtccgtgggctgaacatacagacacctttagacggaaccaggagattcatgtgggtattgattcataatttgaatggtgatgtgacggagcatctacaagaagaaatgacagccggtattttaggacttcgcaagatcaaagcccgaaaaagaaattccctgagaaccaagaaaacaaagaaaaacgccaaccactcttgaatttgtgaggccttgaaactgcgatttccatctcttccacaaatcatttaaccccggccgcgctggccacgcgcacgttgcactgtagccttaccacgcgccaaaccgacaccgcgcccgcgctggcctcgtgtacggaacatgggagcattcctggaagtgagaagctaatcagtaaaggtgaaaacagagatgcgcagtccgccaaattgcgattcgaagactggatatcagggtttgacgtaccggagcatgtcaggcacgatgaagaatcgcacgtggctgccgcgaatgtaaacctggtcgagatgggagacacggccatcgcgggcagtgacggtgatgtccttgagctgaacgttcatgttgtcctcggctgtaaagaaaaccagtcagtatggaaccgcgcaaaagaaacaccccagaagcttctgtacagaccgcctctctaaatagagaacagacgcccaaaagctcgagcagcgatgagcgacgtaccttccaaaagcttcccccggtagacgactcctgatgtgatctcaattgtcacgacatggccctaatggaaaacaatattagcccatctgcctcgcgctatccacagcgatatccattttcgcgatatcatgcacacatcctgcccttccgtccaataacttgaatagcaatatcagggaacgtaacgcacctgcgcttcgttgaggagcttgatcgggatgccgatcgtggaggtgagcttgcccattttgactgtgtgacggcgaacgaggatggaaaacggttaaagaagtcgaacagaaccactgacagcttcccttgcaccaaagaagagacaaatcaaggcaatgggtggtcgcggggagatggtgggacagtgatgaggtcggagtaagtggaggttaagagaaaggcgaagagtgcctcattgcctaaggcagtgcaaagcctgcaaaccactcgggacgacactagcacatccgctttgggttctctatcccgaccaaacaacaactccaacctcaaaaaggcacaaaaactcccacataatgcgtgccgaatagccctgtctatatctgtcataattctacataatccgaaaccaaccgtaatggccggctcacccaattccaacctacgcggcttcaaccacgccgtccaaaccctcctcaaacaaccaacccaattcctcccacacctcacaatccctaccttcacccatctccccgagaacctagggccacacctgatcaacgcaaagaagggatcccaagcgcaaataccaactcccgaaaaacccccgcacacacccacaatccgcgctctggtcctcgacaaagacaatacactctgcgcagcgaaaacaacatctttcccaccgcagatcctcgcaaaactctcctcgctccgcgcctcaccaacctccccctttaaccaaactacgaacccgcactcaatcctgattgtctcaaaccgcgccggcagtcacccgcgcttcgacggcgaaatctccgcgctggaagcgcagcttgcgcacctgcgcattcctgttttccggctgccggccggcacggaaaagaagccgttttgcggcgaggaggttgtgcagtggtttcgggagaggggcgttgttgattctccgcatgagatcgctgtagttggagatcggcttgggaccgatgtgcttatggcggggatgatggggtcgtggagtgtttggtgtaaggagggggtgtttgatgttgggatggaggggaagccggagcggaatattttggagaagatggaggtttggattgagtggttccttcgggagaagggagggtaccgggcacctttgccgatggggtgggagaagcacaagcagtcatgagatgtgggatgctgggtttatataaacatttgagatacccttgttatagtatgtggttagcattgtacaatatagcgagactgaactatggctacagtctatacggagttttgtacgatacaaaatgaatttattcagggcttagcgtcaatcctccacactcgtataccgccagctcagcgctgtcctacctttgtggtcttgagcagaagatatcacaactctgcgcagcccagaggatcagcgttggttggatgtcagacccaaacaggtgccgacagaacaagctcatgtgcaaaaattcgactccagacccatgatagggaaatggaccattgtacccacattgagagtgcagggcagacacaaagtctagcaccagcctcgaagactcacagaaaagagaacaaaaaaaaagaaaatggaggggaatggagtcgcagtccaagtcggtctgtttggcataaccacgtaaaagagaaatggaaattgaaaaatggagaaatgggaagatgagaaaaaaacgagaaagaaacgagaaaaaatccggtcatgaatcagaaaaagaagattgaagaatgataaattgaccgggagaagaagaagataaagggaaaaaagaagtcctgtattcaaccgggacagccgggaaaaacaggagcaaaaagatcaaaaatcgcttcaggaccggccccagaatggaaagggtataatcaatagaacaagacacaagggtatgtcacgcaagaaacacatcaaaaggtaaaatcgcttccctaggcatcgccagcgagacgagaatcatccaaaaagagccgtgataaagggatgggttttgcaaaacaccgaaatccagcacctagccacgcctcttgatattggacaatcaagaaattcccccaaagtagaaaaaaccccaagaacccatcgcaagcataagcgccgcatgcgtagagaaggccgtgaaacatcaagagacaaaggagagacacaagctcaaaaaccccccagacgcctactcatgacccggttggcataccctgcgagttgatctcgtctaggttagccataccatgggagtaatcgcccatgccaggagaagggtgggcagggaggctgtgcatgggcagttcgaagctagggctttcatgcgaaacgccaaagttgacgtgttgcttcgagtacatatcattcatggagagaccgtcatcgaagccggtctgctggtcgtgcgagaaaccgtacatatcggacgaggcgtgggacatgttggacaatggcggtgagtggcttgcaatcagtgggtctgcagggctcatgctagagtaaggagatggcgcatgagagcccattgtcgaggcatcggtcgatcctcccgagacgaagggcacgttgaactgaggcgccatgttggcgactggggtcgattcgccttggccggcattgctgtacatgggactggcgaagtcgggaggcgatccggtggtcgtcgcggacatagagttggtgcggaaatccaggccatatccctgggtgtcgatgcgaaggtctgtggggagatggtgcactgactgtggaacgggtgcgtagatacctgcctcggtgtggttgaatgggggaggcgctggcgcgtggaaagaagacataggactctggaatgatgagaagtcaactgcaacaggtaccgaacggcttcgttggcgcttgtggccacgagcagctggcatgttgaagcccaagtggttgctgtcttggtacagattcatgtaagcgggagcggcgaactggttgggctgagatgcaggacgctggatgaatgggggagacatcgcagctggcacagcaaagctgctgctgttgttataagccaggcggttctggaaggactccaaggacacgagcttggcaagctgaacgctcaagaccttgggatggcctcccaggtgatgaaccatgatctgactagcttgctgttcctcggtgaaatcgccgcactggtagaaacctccagagttggacgagtccatgtaaaagtgcggcgggcggttcagttccacgacaagaccccctggtcgaggtggttccccattcggcccagggcttggatcaccggtttccaaggtgatgttcttgatataggcgaaaggatactcgattttatagccggcagcatcgttgttgatatagtaagtcatgcatgccttatcaggggagtagaatacgaccaagtccatggcgttttgtccaatgcgccgccagctgccgacagtcaaggaacgacaagtgaagtgagaaatcactagatacaccaattagtctaggagacgatggagcggatgaagttgttaaacataccaactttgccagaggggctggtctcgtttgcgtacatgctaggcgggccatatgctccagcacgtccaaaggggtctcttgcgccaggcttgttcgggtcaaactgcattgcgagatagtgtcgcatggattccgggatagaatcgcatccttcgccagtctcaatgctcttttttgcaagcatcttgattttagcacgactgtcttgagtcagtacacataaagatagagacgatcccgactaggacctaccgattctggaaccagatttgaacagatcgctccgtcatattaatgtccgaggcaatacgttctctggtagcggcagtgggtgtcgggttcttgttaaattcgatctccagaaggacaagctgatcctgggttgcgcgttgacgtttgttatttttctgctgttgagtcagagtgcttttgcgaggaggccggcgcgtagccgaagaattggcggtggtagcactcgaggtcgacggagagggcgtggaagctggaggcgaggaggacgatgccttgggcgcaattgcaccggttggcgggtaacgcatttctgtcaacgaagacataatgtaacgtggtacggtggaaatatatcacgcaatcggaattgtgttcaaggtgttcaatatgcttctttttttttcggtggtgtatataggttttgttcggaaatagaaggtatgatgtgacgatccggccgacaaaaaaatgagacggatgtgattgtggtgcggagacggagtgttggaaatgttgattctctcaaagcagccgcaggcgcgagagggtcaagttcaggatgtaaatgaatggaagtctagcgtagggatcgaatggcgttcgagggcgtccacgtcagagactgggaggttgggttgaaagggcgcgtcgcagaggcgtccaaaaaggagtggataaatagaaaggctggcctaagcagctggaaacgaatggcaggggaataatttctccctatatcgacaagaatcactgaagaatcaatgaagatgtttcggcaaatgctcaaatgcccgggttgaatcgatcaacggggcgggaacggaggggtgcaaaccgttctcgaggaaacgaatgaattgggcagaaatgagtgatagaatgtcgccgtgaaagaatgaaacggacgccaaaaagaaaagaaaagaatggagggaatgggaaacacaaaaagcgcaggacagaaagcggatcaggagatgggagatgctgactacacatcgatggacaacgcaccggacctttctggactattggcacctcgtgggggccccattgtattcttgggtcagggcctcgatttgtcctttttttagttttcttacggtttttgcactttctttttcttcctcttctatgcggttagaccgaaaaatccatggatgtttctttttttcttttccatccgggtccagtgtatggtgtgtatgtgtcgagtggagggaaaactggtttgggcccctgcgtttgcctgcataagcccaaccagcatcacggaggcttggagcaataagggcgcagactgaacctccattgttttggagaggggtacgcgtgccactccccttactcggcgtctatgtcttccttgtccaactacatcggtgtgactctccctcaggggcaagtgtacggagtagttcagtagaaacgaatgaactacacaagcctcatcgctactagtagaatgccgaacggcatccacgtgagatcgaggaatctgagacaccatcagccttctgagacaactgtcaggatgtcaatgcgttttgacaatgtgtttgacgaattaacgaggtggacggagtggatgggcgatgtgatagaaagtttttcccctggagactgtttcccctgattcgagccacaggactattgaaccatggttccaggggctaatccagtggactcggccaataagcatgcagttacacgtgcagttccgtggaccgccaaaggagaaacattcaggtacccgccccggcattggttatgattggttctagagacatgacatgtcattctagaccccgaaccccgaccggtattgaatttagcgtgcaactctccttgagactctccgtcacatccggttttctgatattccatttagggaggagagtatgaagtacggatcatatgatataatagggagtataaattcaacctggaatgtatacaacagcaataatggatgtaagaagttgtgcatcgagaaccccgaatttatgaatccttctcaaaaccggggcattcagcctattccccaaatgatctcggtctactccggtccgcggggtttgttcctttacattattttgcttccgctactgcatgcagtgaccttctagtttaataaccccaacacaggtagtgtcctatcttccattgttgacatgcgagaacccgggcattcccatctaggtaaatacccctgggacagttcattgtttcaattttgatccgcgaaccggttcatccctaattaccgagggaaaagagaacaccgccccctaaagatccaaaaatattaacttcgttagaagatgaagaaacaagcccctctatcaagcgcttggacataactatccacaattgacaattcagttcccctcggccaaccggagccactaccaaactctcgtagtttatccgtagtttgccagatctgctcaataagctccattgccgagttccgctgttgttccctataataagccgtcatagactcatgcttttgccgaacccacacacgatcctcgggcgataaggcctccctcgcagcaatgtaaaatggctgcggcagcgacgaatcaggcccacaccccgtcgatagatgatccattagcccaaagcatacatgtaccaaatgatgcacgcgcggtgagcacgtctgatctcgaaaaacccgacgggcaagcagtaaatgcgcagtccagtaaaagcactcggtgaggatatccagaggtgcgcgctcacctttcgctggcgggattcctttgtaaccggatccccacgcgcgaagctcggtgtcgagttggaatgctttattgagaatggcgccatcgtctgtatgtgtctcgaacgcctcgcttacgtcacaggctagatgcgctattcgtactaggaagcacattagtggctgtgggcatcctgtcatcttgtggaatgagggctcggtggtgtcccagcgattctggtcgggctggttgagtataaacttctgcggtgcgtatggccttcgctgtcgtgagatggctagcattacgtcgaccatagcgaatcgctgcacagtcatacgtgcgatggggttttgtggtatttcgtcgaagtagccaagtgcttgcatgagccaggaagcgcatttgacgtggggctccagtactccatctgccgtttgtgccacgacgatcccctgaagaacgacggctgtgaggagcgcttcttgctcgtacttgttactggttgccattgtacctacgtcgcaggcggccctgtcgtcgatactgagtaggttttgtccaagcgttctgagcattcgctgctggcgcttggctgcgagatcaatgctggttaatccgaaattgagcatatgctccgttgatatgcatacaatagtctcgagcagaattggtgatgatagggctgggatggagacctgccggtaagggttgtcaggtccatctacagcggggacattggatgagacaaggcttatgtctggcaagtattcgtgattagctattccaattccatggcatagaatgaggccacatacaatactcccaggcagacttttcttctgccgattcaaaatatgtctctacgaaaagtgccgaaggttgaccaagcatgttttgttcaattgctggacgaggatctttgcagcgaggcttatgtcttgtctgaattgtctcttttggttgaacccatttcagacccaatggatatctgcactccaaattccgcgaagcacagaacgagcagattggctgttgctcgtcacatttattgtgcttctttcgacattgcagacatccttttccgcatttatattagcacctgcacttcgcctggggatgagccgccataccagtccgtgatcgtgtgaacctgttgcctcgaggcatttggatgatcagacaaatgatgcactactggctagtgggagatcgacaaataatcaaggtagtggtgttatatatccccgggtatcaggcaagttccccgcagccttatctatatggcagtcacctgatgaccgaccaattagattattttcacaagcgaaacaatatatattgcaatggcactactagaccagactaaatctataagatatgctaagttttgcgtatcacggcccatgagaagggagaatgtgggagttaatagtcgctagaacgaacacttttgaaatcgctacgaataccgcctcccacctatcagtagaccgacatattgcggcattggtttatcatagagcagctgaaaaaacttgagcatacacaagaagtcattcatcatcattagttaaaagtagaggtggcaggtttaactaagctaattgcgaggaggtacaatagagactacataattcgtagagaacccactatcccagaacctcctgaataacccgaacagttcgctcgactatcaaatcgatctcctcacgggtagtattgtaaggcggcgccaaaataatatggtcaccattagcaccgtcgataccgccgttgcccggcagcaacgaaatcgcatgtgcaggcttgaggcctgtcgcgtgcagagtccgagaaagcgcctgtgaaggcggatatggctctttcgtctctttatcctggacaaattccatctataatcatattagcaaggaataaaagtcaaccaaaaagaaaactaacagcccagaataatcccctgccacgaatatcaccaacatgagggtgactatccagacgctcatgaagacgctgacccagatatgctcccatcgcccgcacattcggtagtagatcgtcctcttgtataatctgctgcaccctatatgcagccgcacaggcaaccgggtgcccttggtatgtctgactgtggacgaacgcgccggtgcccttgtttagagtatcgacgacgtgtttgttgatgagtaacccagcgatcggggcatagccggcaccgagtcccttggcaattgtttggagatcagggacgacgtcttcttgctcccaggcgtggagagttccggtgcggcccatgccagacatgacttcgtctaggatgaagagtgccccgtgtcgctcgcagacggcctttagtgctttgaggtagccgggcaatggtgggacgcagccaagtgtctattgaaatagttagcacgtttagcatggcgggattggttgtactcacagcacctggcattgtctcggcgacgaatgcacagacagtgttggggccaagtctctggaattcatcctccagttcctgggctagtcttgcgacatagtcttcggcgctttcgttggcgttcattctgcggtaggggtagcattgtggcacgtggtggatgttcttcgaaagaagactttcatagatcctccgccgggaggcgtggtgcccaacagcaagtgatccgagggtgtttccgtggtaggacgacttccgagaaatgatgtttaccctctggggctcagggacgggcagctccgtgaaatactgaatggccatcttcacagcagcctcgacagcctcggtacctattgtggttttagtaaccaatcttggctcagcatggacaggtttcttacccgagctcacaatgtaagcacgagacatcttgcctccagtggagtctaccagaagttttgccaatctctccgcagcactgttggtgaaaaacatggaatagcagtaggggactttttttagctggtccaagatggcttcgtggacccgctcgtcgctatgaccaagacaggagacagctgcaccgcatgtcgcatccaggatctccaggtcatcctcggttagcaggtagctccctcgaccaccgacgatgttcaagggttcatttcgcaactggtggtagaggactccactagatgctttgaggccagtggagtcgacctgcttctcggaaggggtaggcactgaagctggtgccagttctggtgtatagtcacccattgtatggattgcgctcaatggttggtgtatgggaaggaaaaggatgaaaaaggatgaatcaagtgatcactgaagatgtttgatctggactgggactgtattgtgctgggccgataggagtcatatatagactgaccccgccatagccaagaattgaattgcagaatcaggacactaattctggaaaaaatagcccatacataacgccgtgattggcaagtcccgccttgtcgcacatcgtgaagttcatacttggctgcgataagctaatcccaaagaggaaatctttgtcggacccacgttcgttgactacagcatgcatgtgataggtcgaacaattcatgagactgagcttattgataagaagaatatgaccccggggttctgctttgacttcagctcgtaccgggtacacagatgcattggagataggaccgagggggatcggaacgacattcgagtccgaggaccgaccacagcacaaacagacattattgagcaatcagacgctgaagaacacgacaggtaaccctggaggtcacacgcgaacactatgatgcagctacaaaccaacaacccgtcagtcagacagactgcccctcattgatatgcccctcaattgttcttcgccatctcagccgaataaccggagcccagtgcagcacctccctcgtcagtggaatatacggccacgcacagcagggccatctagcaacggtgaaattaatcatcgtctcggacattatacttggtttgatgaaagggtcacgtccggtagaagtcatggtttctcagaatgtccttgtctagaagtttccttgatatacgatcacatttgacggaggtaatgtacaggcaaacatatatacaatgtcgaacgtccagcgttcggtagccaacatatattctatatcgtgatcagggatgtgcgatggccttgaacagatctacaagagtcctccatggtagctaccatatcttgcagcggtgtcacatatattctacccaaagttagtaaactcgacgaatgaatagataaggcaagaaagattacatacctctcgtctgatcctgaagtcctcgtaaattcccaaccaaaggtttttgacgcggcagtcatcttcataaccagttgtcgggttcaactcgcagggaggctgtgattcttcgatcaaatctgggagagctctaatccatggctaccgaaaggagttagcttctctaggcgttattgacgggccgatgcccatttagaagtctgacctaccttaggcacaggccagtcggagaaatgcaaatatttagcctctttgaagatcttctctgcatcccatttttctcttgaattccctagatatgcccggtgtttcttggagcggaattccccagctagaagaatatacggccgatgcggtatagtaagtgcagtatccttgtacatgttgttcatgatctccatatcaaaggtgctagagttggcactagaaattgaatccatcgtgcgattgaaggcagctgtagatggttcaacaagcatgatagcaggggtgaaaagaccctttctcggatttttccagtaggctgagggcatggcaacggggctggacggcgccaggaataactcgtccatagtctgaatacaggtcagttcgcgtttgtaacaagcaagtgtatgataactgtacacacctgcagaaccgttgcatctgaatccaagtgaaggacccggtcataatctgttaggttaaacgcaagtagttttgtgtagctctttgaccatcccactaacggatacattgcaaagtcagcttcaaattggatttcaacagcagcaccgcgtgggcagaggttactcaccatcactcccaggcctcatctgtatctcgattggcttgagcttgactccgtaatggtctcgtgcatagtgaagcatgcggctttcactcgaatcaccgtcctcagatataggccactcggaggggtacatcaacatacgatcagctttgcttccaagcctatggagggtctcgaacagcatgaccgagttgcataaataagaccggtcggtggcatattggatgtacgcaaatcgcgaccagttgacttgcttcctggcaacagcgaggccctgaccagaatcgctgaaacagtccattgttcgaagttccagtaacgtaacaactcctaaacaggtagctacacccacaaagatggcgcgaaatagtttctgggatattgtggtcctgctcaacatgatcacggttggtagctccaaacagaatattcggtatttcacactcttttgcggagcgggtctatttaagggtgctctctaataagcccatcttggaaagcattgttaaagcggcccatgctaaggattccgcccagctagttcccacgggcttctttcaaagtaagtgttgggcatgatgtgatagacgttcatctttcattgtttcgttgtcactactgatcggcggtggaaaggaagggttcccaagggcgtatttcgacgcaagaagtctttgtcttctttgtctgtgtgtccatcaccaacttcaaaactaccttggcgctattatgcaagtgttgctccttcaatttcaagactagactaaagccatatgactactttctgtaagggaacttctacagtattcctttcctctatcacaaatagttgtttgtactttgcgatacaacagttttgcgcttggtactccatgccctcatgatcttgtctactaaccaataccatcttcaaaaagcggcctatgagcccggtgacttattattggtaagtcctatagtgctttgtagggcgtttcatatcttttgccgaatatatttttcctgtgtcggttttagatggaaaggtccccggattctataaataaccagccactcgcggcaggagctactttatttctttcatcgatggtgataagtgacgccaaggcctttctacatgtctttttggcttagcgacgaaagaggaatgacagaccaccgccgtccctatcatcgtttcaatctccgctcttaagttgtacgagcggccgatgtgcgcatccaaggggccgtcgggcaaagcgattggcaatcttgagtgaccccatgtattaggtagctagtacgcagcggtataggcgccagctgccaaaaccccatttccgggaaatattgatgccttaatgtctgatttgggcctgacttctgaccgcttcttataccgctctgtacaatgtaatgtaaatcataagcttgtaagaatgaagcctttgtctcccatacaaatacatgcatctccgatttttgaggtggtttaccagctgtctccctctagtatgacaattgaggcctttttctcccatacaaatgcatgcactctccatttttgaaggtggtttactagagagatatatatttgtatgggagaaaaaggcttcattttatagaatctagcgacagctgtcagactgtgtattggaataaaatacggcattattccactcgacacaaaaaccaaggtttttgtatatagcctaatggagaccatatccccgtttggcactatggtactgtacatacatcttattaaggctactgtaatagtatttcaagtatttcaatttttctgccggtcttagttcaggcctccaggccaaaaccaggcaataaggcatcattaattgtgggaaatggggttttggcagctggcgcctataccgctgcgtagtagctagcctgtagtatatggaatgcagacagaagattagagctaattaatcgtgtgcatatctagtaaatctagtaattgcatttggcgatactctcatctaccatatgtaaacccgcctctcgctcgaagtcgtcacaaatatttagacttggtatgttatcattccactcatagtcgtgttacgctagtggcaacacttttggcatcaggcactgactagaaagtaatccctatactatccttgccacttgaaatcaaccatttacattatggtgtcctcttctgacgcgggacaatgagttgagatgcaatcgttacttttgctatgctagtggttgctcttaacagaagttatttatttcttttttaaaatgcaatagtgcatgcattctgcttccccttgaagttggcccattacttgtcgctctcacacagaaacaatttgtaatagtcctgcttctagacgtattcttttgcagatactactagcaaaaataaattaatttgaggctttggcccttctttatgaagtatttccggaagcccttaatttccgcgccctgccgatcatcactgttcaagcagccactttggcatctgataagtcaggccagtccccgaacgtttaccgcgagaactttaagggctgtggcgttttttaggaagttacctcgtgttcgacacgttcccctctgcggattgcaattggtatgttgtaagtttgcgcccctatcaatcgtgcatatgcagacaatgagccacaataaggtcgtttaatcgcatacttccaacatggaattttcgaattattcgatcgggggacccgaacgacaagccaaaaggacccacagcgtgtaaatttaatatggagtactccgtactccgtaagtcatcacatgcaggaagaagatattaatgttgtgcaagtagtcttgttttgagatttataatatactccaggttttccatctagaaatattataagttaggtacaatatatagagcgtaatgcggctattacacacaactgttcatctattgatcttttctgagccgttaattcacaaacgtatgactgcggtgttagcacgggctcaagtacctgcatataacattgattaaaagcacattggaataagttgtgccggaatatcttacagtctagtgacttaatgtctggccgagttagcatgtgcctgtcaaatcaacaaagaccaatggtagcagtggggacaagcacgagttaagcatgccgagtagccaagactcttcttggtcgattcgaggaaatgctacgataaccaattggatcagtgatatctactctgcccggatactgaggtataaataatcgtctttgctctggttactcagtattttcgctcccatcttcaccatcttagtcccttcaaaatgctgttgccacgctcccttatagtggggcttgtcttctgcctcagtggcattgatattgcgtccgctgctaccgccaaacttcccatcgctgaacaatccgccgaggtcgattccgacctggcggctatttactatggttcatccttccaaaactccctgcttgtgggtaacgatggaggcgctgctactggtggcgttcgatctttcagtctgactgatatggaagaagtcgccagccgcacgcctggtcgtaccaaggttgctggtgtgatgtatgatgtggggaagaaagatctaattgtgtctatcgctgctcctgactcaatcattcgggtctttgacatcgatggcaccactgagattccctcggcgcagatcaaagccctcggggattggtcttctctgtgcacgtggcgcagccccagcagtggcggacactacttttatctgcttggaaagaaagaggcgagacaattccttgtccgtgagaaggactctgacattgagatccttgaggtcagtatcttaagcgacacacgtcttctgccgtactgcggatgctgaaagatatttaggtccaaagattcaacgtccctgtgtcagcttcttgtgctgtttctcccaccaatggtactgtctatctggcaggtgaggacagcagcgtttacactttcaaggccacagaatcaacgaaggcccccaaaatccaggtcctgggacaggttgatgatgaggtgacaggactagccgtttacgttgcgcctgagaccgattacttgttcgtgggtcagtccagtgttgtcaatatctattcacagaaattgcggctcaaaggtagcttgacccttaccggcgctgaagatattgaggttgctggtctgtctctttaccagagtgcttttactcagtatcctgatggaattctgggttactctcttgagacggatgctagcaagggctatggcattagctccttggagccggttttcactgagctcggtctcgaacccaacactacatactccccacggaatgttgatccctccctccagggccctcaagagaatggctttgtggacggagatggctcgctcgagtgctttaccggatttacaggcacagactgtacacagtttacgtgcccgaactcctgctccggcaatggaaagtgtgtcggacccaacgaatgcaaatgtgaggattcctgggcaggtcctgaatgctcctgggttggggttgaacccaaatacgagactgatgccaacggtggtgacggtgatgaccctgccatctggatttctcccgtgagtgccgaccagtccaccatcatcaccacaaccaaatcggaactgggtgctgggtttgctgttttcgatcttgccggcaaactgcttcaaacagtttccgctggagagccaaacaacgttgatgttatttatggcttcgagatcggtgatcgcaaggtcgatctcgcctacgcggcatgccgggaggatgacacactgtggtatgttattcaaaaacctttctttttcgctttcctttctgtttgtttcttcttgtgctaacatcactttcaagtctcttcgaaatcgcttccaacggaacgctgaaatctattcccggtggctcgcagcctgtgaaaaccgactacaccgtctacggctcctgcacctaccgctcgcccatcagcggcaagcagtatctctttgtcaatgagaagtccggcgagtaccttcaatacgaactgactgccttgaccaatggcacactagccaccactctcgtccgcacattcactggtggttccggtggtcaacccgaaggctgcgtcgctgatgaggaaaactccttcattttcctcggcgaagagccctacggtctgtggagatacgatgccgagcccgatggctcatctaccggaaccttggttgcgcgtgccggcgatggtacccttttcgccgatgttgagggtgtcacgcttctgccaggcaaaacaccagagcaaggatttgtcattgtctcctgccagggtgtcagtgcatactcagtgtatcgtcgtgctgctccccatgagcatgtcatgactttcactatccaaacttcggcagatggaagcatcgacggggtgaccaacacagatggtgtaaccgcagttggaactgctctgaatgccgatttcccgcacggtctgctggtcgtgcatgacgatgcgaaccaattggctactggagggactgctgaactggcatcattcaagctggccagtatcgcagatgtgtttggacaagagggagagactcttttggccgatattgatgcgacatgggaccccagggcataaatgctgatcctatagggttcaattgccgaagaatttggtgattgtcgtccgtggattatacttctatagatatgatacacttatttctctatcacaactcgggaaatctttacttgatgatgcatctcttcgtctgtttctctccggagattctgctgtaactcctatcgtatctttctggccgattttaatttacctctcaagatccttttccttacctaccaccacagctagttaaaacaatagggagaacacctgcatactactagtgtgtgcttggagagtattcagtcttgcatctcttgggcagaaggctagtatccaagccatagccaactggtcctttgttgaaatcattattgtaattcatgtatttaccactggacaccactaatgactagggtgtcctatacgagaaaaggccagtgtcctccgtagatcctttgccaagaaccggggtgactcactcacaacttcaccccggacaacgcaacctctccaggccaagtcgtgtgtgcaactttacccatcacgcagagcaggttaaaggcgtctgctcactggtttacctactcaacaagctgcctaaggattttcccaaacccagactttccccatcgagtagaatggcttcatcctccgtcttcccattccacctgggagagacatcaaacgaacgagtcaagctcacccccttcaacccagagcaacactgtgaaacgttcttccgcatatcgtcgttccatccggagatatacacacacttgcccctactacccccgacctcagcaaccgagctcaaatccctcttctacagtgattccacaaaccacattctatccttctccaacccggaatccttcgcttttgcaatcatagacaagacacggccgccgtccccagaagatcccgaaggtgaactagccggcacagtgagctttatccgcacatcgccaacgaacctgcgtacggagattggattcatcgtcatcctgcctccgtaccagcgaacccatgtggcgactaatgccgttggactcgctctacggcttgcctttgcatgcacggagaatggaggtcttggattacgcagagtgcattggtcggctagtacgatgaaccttgctaggccgaaaaaatggaatacgcgacggtgcgcgaaataaaaggtggtgctttctccgaagcggggagatctcggtatacgggtgccgggggtagcgaccccgcgggccgctaccctagctgtagggtattgaaaaaaaaaaggctcgcttaggctagagcgaaggacttataacctaatggaggtgcaatctagatggaaatggaatggatggagaaaacactatatcgattgacgatctcgcacgaggagaggaggaagagagaaggaaaggagagagagctatcatacatagaggttctatcacatagtgatgccttaggcatctaacacttgttcacctgaactggacatggatgtatccctggcctatatctcctttgcctttcgaggtagttttgggttacagaatactctatgggacactagggtttgtttataggtggaaatactatgctgacggttgagtatctggatcaacccgcgcgttgaggattggtttgatctagcatatttgttcctagacgtaaaatgcgagaattagacacccttccattgccattgggaactggaataggaaagacatcgtcctctaatggttgcgtatatcatccgagtcgatgtttgtagtagcacgtaagatgtcgagggattgcgtcttatcacgtaaccttgacaagcccaactctgccagcaaaataaattcgagactttcaatgtcttcttggccttgaagttaggctgagcactagcaaggctggtgcatccttttccaagcttgcatgaatcaaagcaaattgcgcgagtattgcgcaagactatcccgaagaatcgtcatgtccgtgtgctagggacccgctagttaaacctataggaggtaataaacattagtgtcggatttaacgactattctctctcctcaactgcctggtatcagggcgggatggttgtgggatctctcagtgacgcgattgctaggtccgctgaggacatatttcaccagttgtataattatttaaggtcgccgctacttattcacaccaaagaccttgtgcagtaatataatagtctgtacacaggccttactagtgtcaaacaaccccgaaagcacgatgggaaccatgggtgattctcaacaagtgacgaccacttcggtgtacagcacagatgcggagaatcagattaagagagataatggtacgaagtctgtcaggtcatggaaaagttatatatgggatacatgggaacttccaccagatcaacgctggatgctttttaaagtagatgcttacgttctcacgttcgcatctctcggatatttcttgaagaatatcgaccaaacaaatgtcaacaatgcctttctcagtggcatgaaagaggatctcgggatgtatggcgatcaactagtgactagtatgtgcattcgctctcgtccgacccgttttgctctgttctcccttacgtgaaaacccgggggatttgctaacgacttttacaggcacgtctatctggactgtgggatacgttattggccaaatcccgtccaacttgttgttaactagagtctcgcctcgatgggtcatcccctcgctggaggtaggatggggactcgcgacaatctgtacatcaagtgtcaaatcgtatcgagctctgtatgccttgcgcttcctcgtcggattctttgagtatgtccctattccaagatttcgactactattagttgccatttactaacgccgttatagatcaggattttaccccggcatccattacatgctgggatcatggtacacaccacgggaaattggaaagcgggctatgattttttggctcgctggttcggttggcaccttgttcagtggtttcctccaggccgctgcttatacaaacttgcatgggacaaatggttacgctggatgtatgtgaccgcaactcttggattctaccttcctcaccttttgtggttcgacccatggatcattcaagtgcttatctcagcccaaacgaaaatgaaggaaacaactgctgacagacgagaatagggcgctggttattcattatcgatggtatcatcaccctaccgcttgcactcgccgggtacatattctttcccaacctaccgcaaagcggcaaaaagacatggtggacgacagaagaagaacatattctgtcaatcaagagaatggagaatattggacgtgctggcaagaagccttggactaaggcaaaggtgaaaggtattttgctgagctggcatacttatcttcttcgtgagtcgtcctccacacctctcacacctctcacacctctcacacctctcacacctttcctgtcctagaaatatactgacatttccccacagcattgctatacattctttggaacaatggcatccctcagcccgctatgggctattggctgaagagttttaatgccgaccctgctcctcttcccgggacaacttacactgtcgctcagatcaataaccgtgagttcaactttaggctctacatcctaataaactcggctaattatatatacaagtacctctccccactaccggtgttctcatcgtcatggcattgtcctggggttggctgtctgatgggccatgtcgtggcgctcgctggccattcatttacatcggcgcctttacgactgtaagtcaacagaggttatgtcagttaggtggttttcatactacggtaactaaccccttccctctattccacagatcattttcgcctccctcatgatgaagatgcccttttacacaaatatcaagggccgtatggtcatttattggctaagtaatattggagtaagtttttccggtaaagcattccatcatcacatcttaacgtgcctctagggtggtgccggccctttaatcttaagttggatcaacgagatctgctccaacgacacagagaagcgggcgttgcttgttgcaatggctaatgaccttgcctatgtcgtgcaggctgttgtgagcctcgtcttatttcccttcctcgagtacatactaacaagtttgaccgaaggctcccaatttcatgtggaaaacaacggcgttcccccgcgctcccaagggatatacttggtcaatcgtacttcaaatactactcagtaaagaccatctctatgacaatgggtcttgtttcccgctaataatattttcctagtattgggcaccgcaactgttcaattccttttgtggcgcgataagggaaaagcagccaaggcagaggagagtctcccagctattgaacccgtcgagtcatcgtctatagagggagatacatcagtgggttctaaagaggacgatggcaaaatggctagcccttcccgggtccaaaatgtcggtctgggttaggggatatggttcactgaaggcactgttgctatatagttctatgatagttggcgtcgacaaggcatcagattcatgtttccgccttacgaatcaggccacgacattattttgtccaatgtctttccctacagaaactaacaagttcaagtaactagttatttactatcacggccaagtaatgattatccagatatcccccgaattccatcgcatcccagctggtaaaacccgtgcgaatcgggaatagcgtcctttccccctctgcgagttatgatcgcggatgagggctcgtgcgccaagtctctgcagcactgcctttaaaagggttggaatctgactgatatcaaaagttcagcgattgcctagatggtcacctgcaaggttacaccttagtggagaaggttaccgacttaagaagtacttaagtacttaggtatctcccacagcagcttcatggcagcaaatctcgtgacgatcttggaggcgcagatgcaagccgatcaagaaaatgtatattagccgaatcagcgcttgccgctaattccacttataagagggcacctgcccctcgtggcgtcaaagctcccctgcttccctttctctcttgactaactgcgccagcatcttctcccttcctcggaacttacaggagttcagagaaatattatccctcgctgccgatggattctcaatatcctcccgaatcaattgtccctagtacagcgggcaaggacaaacactcgacgaactcgttgctggcggaggagagatcgattcgaaatggagaccaagatattctgcagggagagaaggtggacgaggttctggctgccaagatgacgcttatcaatgatgtgggaaatcaatatccgcgcaccgtgattgagacatgcaattaactcgaggccctttgtcctctacagaccattgatgagattggtttcacgcctcaccactggaaactattttgcctaaacggattcggatatgctgttgactcgctcattctcttgattcagtccattatctcaacccaggccaggttggagttcaacccatcatattccacagggctcaccatcgcggtttatgtgggcatgttggtgggtgcaattttctggggcttttcggcagatattatcggccgccggttcgcgttcaacttctccctgcttttttcatcggtattcactatcgtcgcgggggctgctccctcttgggtcaccctgggtttgtttatctgcttaagtgcattcggtgctgggggaaacctggttctggataccacagttttccttgaataccttccgggcaaggaacagtggcttttgaccctcatggcggcgtggtggggtgagattacactcccaagtaaacatcctgtcgaaagtctgaactgacccacagtatctaggtctgggtcagcttatcgcaggtctctttgcttgggcctttcttcccaacttctcctgtagcgatgcagctacatgtactcgtgaaaataaccagggatggcgttatgtctggtacacaagcggcgcctttgtgtttgttctctccgtcctccgcttgacaatcatccgccttgaagaaacccccaagttcctgatttccgagggcaaagacgagcaggcagtacacgtcctacgcaatattgccgatcgacacaaccgcccatgcagtctcactatcgagcggcttgaggcatgtggacgaatcgctcatcgaggagccccaggatctggttggttggcgcggctaatctccccaggcgaagtactcttccatgtccgtggactcttcacaactcgcaaaatggcactatcgacgaccctggtctggctctcatggctcctcatcggcctcgcgtatcccctatacaacgtgttcctccccacctatcttgcatcgcggggcgcaatgtttggagagagtagcccgtatatcacctggcggaactatgccatcaacaatacctgtggcatcttcggtcctgtgttagcgggattcatgtgtcgctcgccctggttttggggccgccgaggaaccatgatcatcggagctgtgatcacaatggttttctttttctgctatacgcaagtgcgcactgcaagccagaatctgggctttacatgtgctatttccttctgtttgaacatttactatggtacactctatgcttacacccccgaggtatgtgctcgctcactctgattagatctgtcattctgtatctcattgctcgataggtcttcccctccgcccaccggggcacaggcaacggtgttgctattgggctcaatcggatcatgggaatcatcagtgccgttgttggccaggctgcaaatgtaaggatttattctttgctctcgtggggaaatgcttatatcgagaacagaccagcacgcctgtgccaatctacatatgcgcagccctttacattgtgatggcgatcattgccggagccttgccatttgaaccgtatggccgacgaagcagctgaaggctcagctagccaggatagcggtccccatctcattgatatctaagacatctcataattattgaccctcacgctactacatattattcataagcaatctgataacccggatagagcaaagtgttaatgctaattgaactggaggtcaagttcgaatttcttgcgtgggatattttattctatatgttcttctctgagaaggccacgagatgacatctgaataatggctccgtttcattgacttctcatccatgggtgtcttctttcctcggctgactgctggaatattttccttgtacgaaccctgatttggcctcttactttccacatcagtcgttaggtaccagtaacagttccccgtccagtcgccgacaaaatctgctcatctctccatagccttcgccgccattcctctcgctctattctcccatcgatcccacgccagcgtaagactcaacgtgtctctgcacaaatcctcagtatcacccccaggcggcaactccctaccatttccaaccttcccattaatcttccctttcacaaaccgcatatgccaaggtatgaccccaaccttctcaaaccccatcctctgcgcaagccgagaactactagagtatagatattttcacctatcataaattcgaaatttttaccgagtttttcacggggtttttcacggggttttttatcggggtttttattaggatttttgttaggatttttatcgaatttctttttatataactgtatacgcctatatactcgaacgtccgagtaccctttttatatatacattttttaactaataagaagtacgctagtgtatagtgtatagcgtatagtaagctagtactaaggctagagctaaggctagagctagtgccagtgcctatacccgtactagagctaggatactagtactagatactagcgctagatactagtgctagtgctagagctatatacccgatacctacactacgataatcgttaattctaatcacctccgtctctaccttcacgactaccggctataagagtagtgtctataatcctaccttcgcttaggagcgagtgtagtataaggtacgctaagattagctaatataaactagagggtttatttagtgtaagaggcacgctagggttaaaaggggacgggataaggggggatacagatagtctaacggtaagcttagagctttttgtttacactatatactagataggggtgaggtaggttctataagggggatgttagatacctgaggtatcactatatgatagctctctctcctttccttctctcttcctcctctcctcgtgcgagatcgtcaatcgatatagtgttttctccgtccattccatttccatctagattgcacctctattaacaagccactttgcccggtaagagggatagaataatcaccttagttgaactaccaagaactccttttatttttgctaaaccaaatctgtaatttcgtatctgaatgggtttgagaacaaaattacaaaatcctatgatctatataataagatagtcatgttgctgatggaaggaagaagctacgcagtggaatatgcaactcagagaaataaatggatggactctggagaggagaaaaagaagaagagagagggggaagctatctgcatacacatgaggaagtcctgggaagcgggggatcacgtgataagcacgtgaccaccccaacagttgcctctccgatccggagtcgcgagtctgcagaagtcagcaaaatatcgagatcctagttatagagaaggtaactcacaaaccacacccacggaatatttctactatcatgtttggcctgtctacctcgagcattccaaacagatttgagtagagaaaccgacatttcgctagaaaccccaccatgggaccggatatggtcgaatcgcagaaggagataatgccgagcgtacggggacaaagcatcggccccagccataaaaattggcataaccaccaactcgatcagacgacagtctgcagggatttccgctagggagtctaagattgcagtgaccgatttttgtattattggcgcttcggccggttgagccatatccagcaagcgagatgtgtgcagtatgcatgcgtgacggaaagcctcggcaactgcaggccagcggggattgtcgtttggatatctgtcaggcttcaagctccacgagtacaactcatagcggcaggcattgagaagccgctcgtattctgctgttcccattttgcccgtcgcatgcgccttggcatgctccatgacgttgccgattatcaagaatatctcgcgtgggcagccattgacccgctcgaatttcaagtcgcttaaagtggctacggctgcgcgaagctcgggggaaaagcatagtcgtcgggcgtctgctagtgagcggatgatgtccagcctggtaggatatgcgtcaggactaggagaaactggaaataagatgagagaacttgccatgctaggtttcctaagaaaaatatcgttctttcattctctctgcagagggtatcagacaagcgcaactggttgcaaatcgatagggcacccgtaatatgggctccgtgggtggatatgcccgattcgaaaatcttcagattcattagtcctatgttaacatcagacatcaaaaacgcaagattgtcaactcacatcctggagtaacagtatctgaataataacgaagatcccatcacgttcattttcatccagctcgccagatatcccatttcggagagtttccccaagacagcgtatagctctgactcgatattcaacggccagagtctctcgcagatatgtatctccttttcctattcccatatggcatgcggtaagacctagaacggcataaagcacgccaatttgttcgtatgctagcggcagaatataaacttgatatgggttgtacgcgccagctggaagagcgatttgatgtggacatataacctggtcatctaaataaatattttgcagtcagtcaagtaattcgacacccaggataaacaaacacacaatgtgccagcaacagctccgtccgttctagcattaacaaatcgtccaactcgacggatcgcccttccgactgtggccatggatggtcgagaataggcagccgttcaatattacgatcctcgcacgagggcaaagcacttggatgccgttgatcggattcagattcttcatggctggtatctggatgatcaattccggtgcccggctgagtccggacagcatggtcacggctcacagtagggaccgccctgttcttccacttgccccgggttgctagcccggcaaaacggaacttgtccggatatcctttgcactcaaggcctttggtgatgcatctctgacaaacgggttttgtgcggtcgcatttgcgacacttttcacggcatgttatacaagccgggcctagggtcgtcagagccgcatcttctcggtatgctcggtgtatatttcacaaacctcccgagggcatatcctctctcgcgtggtgataagaatgttggagagatatattttcctagagagtcgacctattaggatgaagagaaagaaagagaatggggtcaacggcaaaaagaaggccggtgataacgccacgtgacggtttacatggtcacttggtgattgtcaagttccttttctttatattattcgagatgacatttaatggagtggcatctttcttcgaccctaatcctcctatgtcatgaagcacaatggagattgtagcctgataaaacgaggcgtctcacataattctggaataactagttaactaagtcacccaatgtcagctaacttggccaaatacaacctttccttgctccgttgcttcatagaaatatatcatgaagcctttcttgaaattcccttcaatgtgactacgttttccctacgcgctgggattgactagcgtggcggcaagccactggggtctcgggagagtgcgtcaccaatgggagacgagtgatccagagatgcctgtcattaaccgccatgttttgaacagtgctaacatgtagaaatgttagtgttgtttcatatgtgcaccaatgacaacgaatattgtcttaaggatgttcgattccaagttgaactgagcctaaatacccaatgcatctctgtctcgacggaatctaagcgtgactctttcttcctttactattatacattctttattatatctctatcatgcaacaaaaaggacacctcgacgagcccaaacacttaatagtctcatcgaaaagcaccccatcaacttcctggatcgagcattttctattcgtcctcctcatcatccccttaacactgagtgctcttgtattatataccgatgtttccacctggtaccttccagataacctatatgcttttgtgaatacaaatcgaacatctgtccagacagcagtccagatcttcggcgcaatcctagcagccatcgaagtcttcgcactctgtcgcctaatcaacttaacaactcgcattcgatttacacaagccccagtctccctagacatgcttggcttctggtcagcactatccactccaacaaacaacttctgtctacctttctggatgattgtcatcatggtacttctcacaaacctatctgctatcatatcagcactatggaccggtgctttgacacccgcaaacgccatcggcatccaacactctaccgtatctattccagattggtccaatatcagtctaatcaaggaatacccctccgagatcgacaagaatggcctatccattcgcgaggcaaagggttacttcacctactcagtaggcatgggcctactaggttcactactatcctccatgaactccgcctcgccaaccgacggcggcgtacgcaatcaccccaaaatggacaacacccgctacaactatcacggccgatcttacggaattggcgcaagtgccggtctctctgacgataatctcgtcgccataccccacgtcagaaactataccttcaacgaagtcggcctcgacgcctcggtcgactgcatatacaatacaagctcgatgtttgtacttcaagaccttccacagccaaccctccacacagcccgaggtttactccccgatagcaaacccagcgcaccggagtactcggtctacgttggtcgaggcgacgatgcaatagttgcgttaggggtggcggcggaccccattgaatacagcgcaaagcgatacatggccatcgcggcagggagttactacaagaatttggataagatccagtgtgccgtcgcgttcaagccggcattattcaatgtctcggttgatattccgggacggaatatcagcgtgagcagagtgagatccgtggacgcggtccatgatatcgacccccatcacagtataacccacatcgtcatgcgacaactcgaactcatctccaacgatctgactagttactatcgctcgacccttggggacgcgttcaatgctagcattagtgattatcgcacttccgttgctggcgggaacgatagcctatcggagatgcagatcgtgatgaagggaatggagaatgcaattacgtccctcgttgacgatatccttggcgggtacgcgtcggctcaattggtggtcggtggattcaagaagtccgcccctgtacgggttgagatctctactttacgcatcgggtcgcgggcttatattattgccagtgcggtgatcacggggttgatcgcacttctggttattggggagggcattcgaatgcggtggtggaaggatctcccgacttttgattatcaggataatcgaggattggttgtgggtgcttctaggggtgggaggggtttcgcggagtatgttgagcacatgaactgtaaggatcttggcaggatcccggtgatttggaggaagggtaagggtcaggaagcatgggatcaaggggaaattgtctttcaacccttgctacatgactccgaagatgatattgagcatattgcatcggataggaattcggtcgcttggatatgagacctcaatggcgtataactgttgatgataatttatgatgcatagcgtcgctatagtgcattagacatgtatcgaagaacatctgtcaaatttctgaattaaaaataacgcgaggcaagaaatatgtacttcacctcaaccgcaaaaagaaaaggggaatcacacgtatgcaatagaacccgatatgtaacgcgaaaagaaagaaaaaaagaaaaaaagccagactgccaacaatgtgagtcggggtatcttggtatcttggaactgacggccgactgtgcaacagaccgaacagcgaataataagaaaagagagaccacggaattggacaatcccaattcaaaaatcagaccaacgcctttcgatgcccgaagggatcgtatgataagtgaatggacaggaatcgcagatgcaatcgctatgaaagaaaaagacggtggaaataacaaaaaaagacgaggggaaatcccgttatacatatacgaatcgaatcttcaatcttgaatcatttgagctgacccttgcgcacagcaccatagcccttactgaagagctcctggatctcaacagaacgccgacgcccattagcgtcttcgggacagagaagtccagactggcgaccacggtccttctcagcattgtgactcgggacgctgctgttatggctaaccgtcgcgctggcggtatcgacctcgagttccttcgtatccatgacacggggacgggcgagcagttcgcgaacctgtcgttcgcgggcatccatttcagccttctccgcgttttcccgggcgatctcgaagcttgatctcttggtgccatggtcccagccctgctgaagttccgaggctgctgcttcttcgaagcgcttgcggatgtcgaggtcttgttcgtattcttggaagatgtcgacgtctgttgggaagaagaacgcgcggagagttgagactgtgaactcgaagaggaggactgctgagacagagaggaagaggacggtccagaagaggaggttgtggccggagtgatggatgaagttggaggggaggaagtagatgcctttgccggaggacattgtgtattcgcggtcgaggatcagatcccacatgaaccagccgccaacggagattatcactacgattagcgacaggtaggttttgttgtggacttccaggacttggagcttcatgttgatgacgatgatgcacgcagagtaggttagtaaacccagggagaagatgtcgttgtcgctggggttcactcttgccaggccatagagactccacatggtgaagaaaattatcaccgctccgcaggtccccatgaatgaccagcccaagtagagccggatattgaagccgccatgcctttgacccttggtgtagagctcaggcacggccaacagtgtcgatgcggagaggtctttggtgaagatacccaggaagatgacagcgagtgaggtgaacagagtgttgaacatactcagactccacggctcgtacaaactggttccagtgtagccgttccagcgctgatacagcgcttgagtcagatagaacagcatttccttccagaacgtgccgagggtatacttgcaggcacgcaggtagttccaccgtccgtgcaccagaagtagcttgagtaggaagcggaactgcgcaatcgagtaatccgaaatacgtgctgcctgcaacccctcctttccagtgattccaatacccacatgggcctcctggatcatggcgatatcgttggcgccatctccaatcgcaagcgtgattgcgtcggtgagctgtttgcggattgacctcaccaagaacgctttttgcttcgggctcgcgcggcaacagataaccgagtctaccttgacagccagctggaagaactgttcacggaccacctcattcgcttcgatcaacgacagcgtctggccatctaccacgaccactgaatgtgccacacggccacgggtaatctccccgataagatgcgcgatcgattgctcaacatcgccattctcatgatccagaatagtcaatgtcgagtactccttgacaaggcgacacgagtggccaacattgatagcagtctcccgcttatcaccagtcaacatccacatcttgatattggctcgtcgcaatttgtcaatagcctccggcacccctttttgcagcttatcctcaatagcagtggcaccagtaagctccagctgctgctcaatctgctcgccggcgtcctcaattttctgctgtcggtcaacgatgctagtgcatgcctcgttgtaggcagtcttccagttcgtgtaggtcgcttcatccaaaaaccggtgaccatacaacaaagtccgcaggccgtcagtggcaaagtcattcagatgctggaagcagcgctcgaaaatagccgcctcgttgacaactagtgcctcctccacaagatcctcatcgtcttcgccattcgtggagcttccagagtccgagatcgcagctgaggctctacccatctgcgccgaaggccgagggctgtaatactcactatcagcctctctgtatcgcataccaccatccgtttccctgtcgcgcagccaaacatcgatactagctcgaagagccgagccctgttggccagtgattgacgaacgccgacggttgaagctcggccgggtcatactgctccgagcaccactgttcttccggctgtggtgctcgctgttacgtcggatgacttggttcatctctgcattcttgcgtctgcttgcacgacgctcgatctcggtcgctttctcatgcgccaggtcggcttgcttcaggagacgcatcagtgtggtgtcggcacctttgcagaataggcaaatgcgctggtcgggcatgcgcacgacaaccgacatgcgctttcgcgcacttgagaattcgatcacgtccaggacctcgtagacttcgtcactggtggcttcgtgcggtccgtttggttgtgtgcggatagtcaatgtgtttgattggcgatccacgacgagatatccgagttcctgcgctgcaagaacaagagctaactcatcgggggaggaagcctggaaagtggtgtttccgttcgcgtcttcttcgggaatgcatgtgtgacacagagccatagacaaaatgaataatttcgcctttcgggcaaagatggtgtaaggcttgcgctggatatattcgagcatctcctcggtgcggtatgtagtagccgaccggccagactggcggagagcatcaagaggcccagaaacattcgacggacggggcatctgagcctcggaaacattagacttgcggcccatagcctttttcccctttgtactccgcttcttgtggatcaacttggtgtggtcgcctgcgagagcagcttcttcctgaaggtcggcgtcatgcaaccacgcggttccagccacactcatcttgcggaatcgcatggagttatttgtcagggtaccggtcttgtcggagaagatgtagctgacttgaccgagctcctcgttgatggtggatgtgcgcgcctcgagcggggtgtcggtttcgggatcgtacatatcgatatcattgagaagcagcatctgggcaactttgacgatttccatactcacgtacagggagatgggaatcatggtgttgaacatgatcaggaatgaagtgaagattggcccataggaaacactagcatcttcaaggtaccaggaatgttgctccacgtcctgagaccagtacttgtaggacacggtgcagataacggccagaataacgaccaacaccacaatcaacatgaccacgcgattgaccttgtcttggagagcgggccttttaattcgcgggttcttgttggcgttcatgcggatcttgcactcctcgccagtataaattaccatacccagagcgcggtcggtgttgcgaaggatgctgccacggtaaacgatctcgttgttagtcaagggcagtttctcctggccattgacgctgacgtgaccgtcgaacttatagagatccaagttggggtcctcaacgacgaagtgcaaggagttgctattgatgtcctccacagtcgagcacaccttggatacaggttgacaaggctgcttgtttttcaaatttgtctcaccgtcgagagccatagtctcaatgtaagcgacaccgttgggtccgctggcgtggaggagagcaatatcagcgggaatcggctggtcgcgctcaagtttgataacgtcgccgacgcgaatgtcctcacacttgattcgctcccaatcttgagcgttgcttatcatggaggcgccgtcctggatcgttccgtggccttggcggagcacccaagcatcccgattgttctcttccttgtccaaacgataccggcgccagtcatcaaatccttccttgcccattgagataccaacgaagattaaaagcggaacgatggttgtgtatgttccagttgtactcaggccagggatcatctgcaggatggctacaactaagaagtagaagttggcgactttggtgaactgggcgaagaattggcggggaaagaaactccagagactgtaacgactcgaacgaatgtagttaccgatataaggcttctgggtgcgctcatcgatcatggaacccaccatagacggatttaagtcaatgtggcgcccatccttagtaggtgggatatccttgatgcgcagaataaatttctggatagaggtcataacagcctggaaacgcgcgacagccactgcagtagtcgcctttttctggagccacttctcatgagccacagacacggagaactgttccttgagacccttttccgaaggttcggaggagacataaggggaagcatcctccttatgcgtcgagtcgagcgtggccgtcggcgcgacgcttaaagcatgcttctcatcggtggcagtgagtgtctcagcagtcggggcctgggccggagtcacattagacgaaggttccttgacctcacccagctcagccagggcgaggtcatccttctccgtcgagttgatggtcttattaaatatggtgcgacggagcgagtacccacggtttcgcgaccgagaccgaccggcggactcaggactcggcgggggaatcggggagagggtcgcatttcggggcgagagtggtgaggtgggtgagggagcggctcgaacagatggaggcgccagcgccgtgttgatggttaggccgcgagaattggggcgtccatcccagtttgtctgtcgttgttcctcggccgactcgcgatcgagatcggttgagaagcgcacatgttgggaggagatccgccgcccggaatcggagagggttcgtgagggtacaagagatgggcgtcggagggcatcgttctgttcgggttggctgccctctgtaggctctgtagatctgtcgttggacatggcgacagtcgaattcctggcacgaatgcgcgggacagatcccgacgatctcggtatcttttttttttctcccctccgaaattattggatccttcctctgctagtatccccctcaagatcaaagtaaagtattcgattgagcgcaccgattagacagtcatccttgtgctgttctttcagtggagatgttttcccctaaatgaaggtgttgcgagggttgagcaaacgaaagtactcccgtcggacgcaaggatagaaaggaagggcgcagtgatttcgtactgttgtatagaagagaaaaagaacagaggccaagaagactaagagactaagagactaagactaaaaaaaacccagagagagaggagcagccaagacccagtcttgagggaagtggtaaacccaaaacggcctagtgttccaactgacgatatctacgaagagtacgagtactccatacaaggatatgataggcatagaatgagaaaattggagttaaagtgggcattggaaacccccgtctaaaacgtctaagaccttcccaatcgccaaaaccgttccaaccttggaagttctgggcaacgcgtaagatgcaaccatcgaatgcccacgctgacgcccccggcacagccccagccaggtttaaattaagaatcgtccaatcagatgggattgtccctcgctgcattggggcgaaaggcccgctggatccagatctaccagagttttaattggccaccctcacattcccaggaccctgcagccctattgcagatggaaaattggggggaacgacaggcctaagtaggtacatggtaggtacggagtacatggtaggtatatggtgacttctaaggttcttctctcttttcctcttttagccaatacatgtataatatgctgcatatgtacaaccactcttgagcgccctagcgaactcgtgggctgattcgttttagtgtagccttggcaggccccttcacaaaggaccgactacatatgtaccttaggtaccccgtacgccatagacctgtcaaccttggaaggccccaaatctaaaagatagaaaaataatattcaacttaaagttaggttcgagttcgtaattcatggaaactacgtggagtaaaagaacccaactaccttccctcaaacgcatggcgaaaaaaccgtaaactcagaagccctatgatgtcacattccatcaatagcgtggcggctgtccaccatactggtagccaggtccaggggatccatacccatgtggctgctgttggccatacccaccccgcgatccctggtagggaggctgctggggaggctgttggtattggccctgcggtgggtagcctggctgagaaccgtacgaagccggtggggcaccagggggcggaccatacggaggctgagcttggccctggggtggcggaggttggccgtaccctcctccgtactggcctgttggtgggggtgcaccacgacgttgattctctcgctcatccttggtgtcgtaagaagaatcgatagcgccgagcatcagtttggcgcactaaacggacagccagttaaaaactaatgcaatcatcaaatatgttgaaacgacttacccaaagctcgcgagtgagatgcacgggtgggttagcacgcgacatctcatcctgctcaacctcaaagtctagaacaccacgttagttagatccactatagaaccccacgtgaaacttactggaagtacagtcgatcagatggccgatatgagggtcctcatccagagagcccaagaagtcgcgagcccgctgatcagttcccacctgcgagaactggaaggctacggtgccggggccataacgggtccgtgacgtctcctccactgcgtagcgaatgacatcacccacggtaccatgaggctcgccagcaggctgtccgtcggtgatggtgatcaccagaacgggcttgtcgagacggttggcctgggcgggttgaacaaccatggggtcgatgactttgctcctcagactggtgcccagaggggtcaggcctgaaaaacggactcgggacactaggcgctcgacatcctctgcattgcggatgccatcgcccttctcgctggagttcatgaatcggacagaaataccatcctggtcaaaggtagatgcggcagtagctacgatgccgagaatttgtttgagctggtcctttcggagtcccttctcttcgaattcgatagatccactgtcatcaacatagagaaccacgtcaaacagcgaaagcttcatgacatcggtcgcaacctccataggcacggcccattcatgaatcagcctattgagcttgcctggtgcttcagcggcaagcgactgaacgagtcggtccagtcgctcgggagggtagaagctttggaggttcttctcctgaatcgcggaaatcaaaagcgatcggtaggctgcgacctgttgctgagtggccgggggagatgcggagggaggggcgccaccgggtgcgccatattggcctggcggcggtccgcttggtggtcctggtgagggaccaggacggccctggccaccggggtacggggaaccctgggtagggtagggtggtgcctggttcaattttccgttagcatcactttccaactattacccattcaacgacaatccgaatactcagacaggatacacagaaataggcagtgatgcagggcagggggtattttgtacatatggcggctgctgtccggggtatggttgttgtccaggatattgctgctgtccggggtattgctgctgtccgggatattgctgctgtccgggatattgttgttgtccggggtatccttgtggaggagcttgctgttgaccaggatagggcgaactaggagaagcatagggctgtcccggttgctgacctgggtatggcgagctagcggagggataaggctggccttgtggtgggggtggaggcgggcggccatagccctgagattgctgagattgctgcgattgctgcgaggcggggtatggtgtggatggcgggggcctggagtacggagatgatggattgttctgaggttgagatgagccgccgtatggaggatagccttggtaaggtcccgacatggttccagaaatatgatgaccgtggaggggtaaatcgtggaagcgggggaaaatcacggaaagcaaaaagacttaagaaaaaatatagcttaccgatccctggggggctggggatcctgaataagcctggtattggggctgttggctctgctaaacattagcacttttttctttttccttctgtatgacgtcgaacgagtcatagcagaagcaggcgcagagatggacatgacttaccgatccaccaggctgcagagcggcaggaggacccccagtgtatcctgacggaggtgcacctccatatgaaccactgttagccatgttctggctattctgagctgcggcgattttctgagcaaactaaagatagtcagattgaggggttctctaggagttgtagtgggagaaatctggaagacttacacccatgatagaactggatggggaaaagaggagaaaaagtaagacacagagaagtatcacgagaggaatccaaagttcgatgacgttgcctgatgtggatagcccctcttagtcgcctaagtgaggctgagctgtatacggagtacggagtacgaaaggtacctcgggatacttggcgcccccacttctccttcccagcaaagaaggtacctccaagtatcttaaatgaagtcagcaggttgatataaatgcggccctatacatataataacacatatgacaacgaattcttggccagagtcatttccacggtgccggtttatgagggcgcttggcctccccactacttatttttacacctccgagcctgaacaggatgcttactgagtaaacaatatgccgacctgtgcatgggtgaacctgtggacctgggaaaaaaacacgtgcttctctttatagctgaaaccgaacatgtcaataggcatccaagctggaatttaaccaatacaccctagctccctcaggtttcacggagcaaatgcgcgatgatcatatccagatagaccccagcacggggtgtggtggcctcaacaccctccaatttggcagcatcatcccacagtcgaagtgagaccatttcgtctcgaagtggatcttcctcaaagttcctgaggtctgcatctcggaagggccccccttgaaatgccagcgacttctgcgaggcagatgatagagatccgtggtatctctggtccgtagcagtgaggtacctaaaagatgagcctgggctcgcaaaaagacggacaagatcacctaccgcttcgcagcgacatgactatttaccaagcgacacactacttcgctgaatccaagggatcgcaggtatgatgccccgatggcttcatggccgacacggccgacgttttccgtgctttcgcgaagattcatgcgtgcctcctcggtggattctagcggaatgatttgaccaatatcatgcaataaagccgcaattaccaactcgtcacgagcatctcgaagatatcagtgaccgtcagagatattaggattaatacgcactcgctttactggcctggtgagccgcctgcagacagtgttctaactggctaatcgactccccgatgtagtcgccttggccatacttttctagagcgccgatcaaagcctctgctttttcttcgggtgattgctgattcatagtcctatttaatcggataggaggggcgttgtgagaaacaagatccggctggacaaaggagagatgaggaagaagcgaggtggaaccttggaaggaagtgtttatatacgccatggcccttttactctatcttcggtccagttgcaagtaccttgactaaagtgttcggtcatcatgccggtggcccacacccgtcagatttgaagtctggacctgactagtatatttcagtaagacatacattttacctagttagaggtattctgttttgactaatcgatgaagttgttacaacatctttggatcacttttgctttacaaagtatgccatgcggcttgactatacccatcaggccgacatcacctttgagtccacagtcaacataggggacccaaaggcatatcgcacacgaccttcctcgtatgactgtccgctttgccgcatgtgtgtcgcaggccagagtttctgacggtcggaatagtactggtcgtgtagattaccttcagcggcacagttatacgttgcatagatcgcacgccggtccttagagctagcattggcgccactgcgatgggccagatacgagccaaaaatcaagatatctcctactttcattaacgaaactgcgatgaaagtattggtgagcttttcaatctgcatacctgactcgagctcagctggtgtccagacattgctttcgacccaatcggacgcaatgcagcgatcactgccgagaggaatatccatgcggtggctgccgtccaccacttccagacctccattggtagcattcattccatcgaccgccgcaaggattgtcaaatgcttgatgtttttaacatgggtgtaggcattggcatcgatatgaggatcaaaaccgcctatcaaacaggtgagttatcaaaacaggcctgtaaagcgggaactgcttaccacttcctgccaacttgtagttaatcttctctttgaagagaagcatctcctctcctgcgagttgttgtagaacacttgttgcacgctgtcctcggaggaagctatcgaatccggcatgcgagttggcaaagttttcagtgcgacacagcacgtgtttgccttccgaatttacctcctcataaggcatccagggcacgtcaggggtgcatggaagatcgtggacttcctgcgcccattctcgcaacagctccgattccttagaagtgaaaaacccacggatcagtaggtatccacgcttctggaagctctccagctgctcagtagagagcgagtaatgggaattgttcatttctgttaccggtatattcgagtaaaaacactgaagacgccgtgctggtgaaacattgcgggctcagaagctcgcattttgtagatcaatcgaaagtccggaggtatcgcccttcgcaccgagatgagtatttcttaaacgcgacaaaatatagatccgccatgtgagatgttcaagcacatgaaagaaagataagctccgataggcctgacaaacgggtactaccctatctgaggaggctgaggatctggagagactggatactcaggcacatggctgaaagatgagttctgatagggttgacgatcaggcagtcaaaggtcaccatgaaactaccgagactgtggagttctggtatccccggggatataaggcagggggagcttagactccaactgagtacagatccacccgcacatctcgcacttcccaccgacgttatcgtgcctctattccacgccgtcattggtctcttttaggaagtaatacactagccataaaatatacctagatagtttctatagatataaatatgtccccgttgatattggtaacatatagcaatttgtatttcattcagtatcctggtcaacatggctacatctcgcaatgactctctcatgaagatggaagattccaaggagcaaatctcgcaaaccgactgggatactgagcaacggaaacccgagaagaagcgctcgggtgtgctcaatgtagtggtatccgggttggccttgttcagtgatggatacaacgctcaaatcagtacgtgttgacctatatctccaaaggtcttctttttactccctgtactaaccgcatggtagttggttacatggagcctttattctcagtcctgtgagtagccctatttccggaacaattttggctaaattgactgatgagtccagttacatggatggaatgtcctcaactataaagtcccgcctttcaaattcttatctcatcggcgagatattcggcatgcttttctttggtgttctaattgaccgtattggtcgtcggactggtatcattgccgcaacggcgtttcttattcttggagtggtgctggcaactgcctctcatgggaaatcgcaactagggtatcttgtccaatacacttcagccattttgatcgagacacattactaacaccacattaagaatgttttggatgatgattgttgcacgaggcattgcaggatttggtgccggaggagaatatcctgtttgtgccactagtgccactgaagctgccgatgagacaatcgacctccgaaagcgacgtggcttcttggttgcactcaccaccgattttgccatagatcttgtcagtaccagtacgacgtcgatggcctccttgctaactttacgttagggatttgttgcagctggcttgatcgctcttattgttctcgcgtgttacagccaacaagattctgaaggagtctggcgcgttacgttcggtctgggtattgtggtaggtctcttgtctgataaagagctagtaagatgtaatgattctgacattggtatcagctaccaatatcaatttgtttcttccgcgtccggatggtcaactctactcaataccaaaagcacgctatcaagtcgcagtatccctatggattagtactacgtcgctactggaagcccatgcttggaacatgtgagtccgttcagcttggttaaattgtacggtggccttagctaacgttgatatttgtagccatggcttggttctgctacgacttcgtcacatatccatttggtctcttctcatccaccatcattgagcagctgaatcccaacaacaccacattccagaatattggatacggggtaggtcatcatatcaccatgttctagcttcgtagactgacaacataatttccagactgttatcaactgtttctaccttccaggatgtttgattggtggtatcctaatggaccgaatcggccgtaaacagaacatgaccctaggtttcatgctctggggtatatggggatttatcctgggagctgccctccatccgattcagagtgttttcccgcttttcatagtcatgtacggcatttttcaagcactcggggagatgggccctggagtgtcgacgtttctctgtgcttcggagtcgttcccaacacccctgcgcggtcatttcctcggatttgcagctgcagttggcaaagctggggcatctattgggacagaagtcttcaccccaattcagaactccttcgatactaccgctaaaggccagcaagcggttttcctaattggtgcggcctttacaatggtgggtggtattctttcctggttcctcatcccagatatgtctcgagagctagagacagaggattccaagtttaaagcatacctggaagagaatggctatgacataagttcgtatggcgaagcattggttgtcaatgcccgcgcttcaacttaaccaccctggtagacaaaaaggaatacagagagagttgagaaatacaccagattcagggcaatattataatacctaaatgagaataacaagttgtgtggtaacaaaaccatagtacgatcttgctataggctgtgttaactcaagggagggatctagtaggccaggcccgaacatgtcggcatctaatcatgagtctcagatcaaaggagataattccatactattttagacctttttgtcgcaattcagatcaagcatactattgtactaatacttcacctgctacttcgcttgaagtagttctggttgtttactgcgacccacatctccacttttatagaacggaggataattcttatttttgttcttacatctatagataggatacttttacaaaagtccatcaacacggcatacagcaaagcattttgattaaagctctgtctaagcagatgagtctacgccagaagcatgacccttcgtcactacacgcgatgatgcctttcattcccaaccaatgtcggttgtacacgtcgcctgaaccatatttaacaagataggatcggcagaagatctgcgactgtctccctaaatatatgaagtgcatcagaatcaaatcttactgaccatggataaaatccggggtaaaactctgaccgaagtatgaaatgtgatcactggacgatgatgtcacaaagttggcatgcttcagggatgcccttgaaaacgacgctgcacagctcacagctcacagggctcttttctttgtttgatcatcctaaagatcgcatcatgaagcatcactcgtactctatctaatcttttgcgctttgctcactttcacattctcaactcccttaatccctaaagagctacctggaatatcattcatattctcagtcattcagctcaggcgacctacaaaaggcccggtcatctctcggctttcttccacctgtaaccatctgatctacagcccccgacctttcctctaacatgtcaacccctgtcctccgcctaggcatcctaggcgccacgaacgccgtccaagcaacctatcttccggtcctccgttccttgaaaacgcattacaccctcacagccatctacgaccccaacgccgagatcgcaaaccaatgccaatcccgcttcgacataacctacagcaccacagtcgtcgaagatgtcctgcgccataaagaagtggacgtcatcctcaacctcctcccaatggagtaccacgagcaatacaccgcgacagccctcgaagcgggcaaagacgtcatggtcgaagtgcctctcacaatgagtatctcaagcctacgccggatccgggaagcagtcaagaaaggcaaagtctcccgatccctggacggcaccaacgaaacagacgggcccaaggtattcgtcggatgtgcgcgccgctacgccccctgcttcacagaagtctttaaaaaggaactcgcggccctaggccgcgtatactacgcgcgctgccgacacatcgcgggcccaatgaaccacatcggcacaccaacctcgagagacatcgcgccgtcaatgaagaggaacaataacccggagcagttccgcgcactgctgaatgacgtcttcgggtcggaagaggatctcacacctgacagagtcgctttctgtcgctacctcggcatgctggggtgtcatgatctatcagtgatgcgcgagtcgttgggattcccagatgccgtttctaacgtcgctatcacggacccgttctactcggccattttccactacacgaattccgctgagaatgacggtcacccgttcatacttgtctatgaggctggggttgatgccataccccgctgcgatgctcatttgactgtctacggcgcgcacaagactctcagcgtggagtatgacttcccgcgtcctggggagaagatcagtactgggacttatgtgcgggttgttgttgaggaagcggatgggacgacggagtcggataatgtcaatggaaatcagatcaacgtggtggagaatgctgttcctctgcctcgtgtgaggcgtacggagactgtcagtacctgtgacgaggcgtatgagcgtgaattcatggctctgcattcttatctggttggtggcgcgtcggcggcgaagacaactgctgacgacgctgtcatggatctgcggctgctgcttatgatctttgaccattacaaccgccaatgcggcaccattcggactccgttgggttgagcgtcgattcctgacaggtggtttgaaagcggtggaggggacattcgtcgggtattttctcaaagaagtcgctagtacttgagctggttttacgggggctgtttacatctggttattggggggaggggcgcggatcggagcctccggagctgaaaaggctggtgggaatatattttactcgcagtctggggttttaggtgccctttaatatgaaatacgggatacatacctggttccatgtatcgtaggtagcattcaggctatgatatctatctgtctgatattacactatcgcttgcccttcttcttattcttcttagcattagagccaccgccggacttttgctgctgaacgggagactcttcagccttctcgttcacaggaccgccctgcgtgagtgcagcagcacgctgcttacccttcttgcccttgggtctgtaagaagagcggtcgcgcacaggcagccagcgctcagggtcgggcttcttggcgggatcgaagtccttgggcagacgggacttgcggacacgcttgttggcgcggtcattggcgctagctgcggtgcgcttgcgggcaccagcgaaggcagcagcagccgctgcaaccgaggaggcggagggagagatgccagcggattccagggctgagacgtcgacgtcggcaatcaggtcaccgaccgccggcaggcggtcgagttcggactcaatctgcgcatagtccagagttgcttgtgaggcaacatagccagcgatggcagtgcgatcgttggggtcttgctggtgcagaccacggaatagatcacctgccgtggctaggtcggagcggtcttcagagtgcaggagggaagcggctgctgcgcggaggagggacacggggggctcgggcttcgcgcgccagtaggaggcggcttgtgcgagggtggtgcggatctgaaccatgcgaccttcgcgctggtacagggagacgaggatgctgaggaggcctgggttgaagcggatggactcgtttgacccttcaagactgcggagggtttgctccatggctgtgatagcagaggtggtgttgccgccgctgacatagagctgtaccactgtcagaagaaggccgatgtccgtgggccgtcgctctagcaagggaacgatctgtttgagggctttagggccggtttcgccttgagcgcgtgctgcggcgttgaatacagagagaaggttggtgatggcgtcggtagatgggcttgggcgttttgactgtgccttagctgtggaccggattataccatcgtacttttgcacaaggaggtctgcggcgtgggagttgccaaccatatcacggtcctgaaattcgaatagtcgatcattattgatggcatctggggtgtcgtggagggccttgtagaggatgtaggggttgacgtcagtcggacgagcgaggacaatgttgttgcgggcaatctttttggtagataactcggtgatgctaggaaaggatgtaagtaacgagtttcgaactggcatgattcaacatacttttccacggagatatctttgagaacagcctcggcctcttccaactttccaagttgaatcaagacatagagttgttgaactgcgattggcagcagctctgcggccttgtcttcaggtgaaaggtcctctgatgtgcggcagatatctatgcagaatgtcagtatgggtcctagtcttgggcaacaaggtggcatgctgactttgagctcgattgagcaagacctcgctctgcttgaattctccctttgcaatgttcaagcaagctgcgttgtaggttgtttcaaatgattccaaatcctccctcgacaatcgatcgtggcgcacgaattccgtctcccctttccattgaagctgggcatcggtagcccacgaattgatgttcaggtcattaacctcgtgagcggaagacgtcgcatctttggagagttgttcataaagctcagctgcccgtcggaagttctcggcacgatagcgctgttacgacaagacaatcaacattggtcctcaagcagaaggacagatggggcaccataccacttgtgcctcgaggtgactagcaccacgcccggcagctgtgcgagtcaaggcttctgtggcttcttcaagcttcccgcatttatatgatgcatacgcgtattccaggcctgcactctgtttcagcgcatcgcctccggcctggaatgtcttgagagcttcttcgtaacggtcgagtttcaacagagcgacgactttcatgtgctgcgcttgcaaatcggatttggatttggcgagggctgcattgcatgactggaggacttcctcgtggtcgtcaatcgacgcccgctgcaatagcgaggccagcgattgcgcaaccatggcgggggtcgctcgagaatttcggggtggtaatagggggcgaagaagatggtaacttcagtatccgatgaaagatgaaattgtgggatttatacaaagaacacagtggccgatttccccagatcaactgatatcaaactccaatgtgcggaactggtcttttccccattggggggtttctgcgcttaacgctaatatgccccgccgtagctcacgtgtcatatttgagcatcagcaagttcacgaataacggtgacagatctcgaattgctcggctttgtagagcgtgtcctgagctgaaactgcgtcaaagtcaattcttgcattgcaaactcgatatacacaaaatttttagcggttatcctggtacttcaaattcacgagtgctgagaccgggggggggggggggtctggaactgggttcaccgtgggatcacatcctctatcggttaacgtacatatttacaacgcaagatacggaggatttatatcggagatggctagactacaccaacgaccctaatccatataccgatggcggctatgtgagtctatggccgctgattgagtcttattcatgttctaacctattggcatacatttagnnnnnnnnnnnnnnnnnnnnnnnnnnnnnnnnnnnnnnnnnnnnnnnnnnnnnnnnnnnnnnnnnnnnnnnnnnnnnnnnnnnnnnnnnnnnnnnnnnnnggggggggggggggggctccgcagctggactacccgaaacatactgaggaaacgaacgttgccgccaacgcgctttctttcgtggtgatatgtacctagcgtgttgaacgatggatagccagccctgcagacctggagacgcaatcaccttagttaagatacgaaggagaaaggaagttttcttcatgtcgatccatcatcatgtccaaggatgattcccactggcccctccctcgtcatttcacatgttgtctagtatctcattgagctgctcgcgcgttctggtaacctttgaaaaaatatgtagttaactagcgtatattcttgcctagccaccaaggcaacctgacatcaatgccatgttttccctgcatccacttatagagtgctcgtgccctgtacttcttaccagtacggagtgccttatacttcatacatcaacagcctcagcactaagttccggcatattacctgttataaatgacgctggccaatagtggagatgtagcgttagattcctgcctaatttaggatgaaattctacatcgggagttatgaaaccatcctcaactatgaagcgactctaaatcacagtgtagtcttctggacggtgtttggattgacaagtactcccaacaatgtcggacatatctctctgtcccattttctggatcggcacatccagtgggtctccgaggtgcttaaagcgaattaaagtggggcaaaactctgtcccgctaagtccattaaaatatcgtcaataggagctcgaagtgataagatgatcaagtgccacttgcctatgagcagactaggattggaactctacgtgatgttcggtatgttgcccactgagtctattctatatatcgtgtgttgatatctatcctttatattctttgttaactcgtgatccatagaggagaaatcatatcgtggcagatcgaactgatgaggaccccccgtcgattcctgccagctatgacccacgctcagaatacagctctgactagtgccggaaagagttatagggagctttcattcatgtgagggccctcgaggaaagactccgagccggccccgaagtgcccagaacatccatggatggtctctgtttattcagatatccgaaaaggtgaccttcagctacccggaacctaggacataagcctttccccatcgggtcgcatttggcaatcggtttcaacggatatgcctattccgatcgcttttgtcgactggttcctccgcctctagagctaattggaacgatactaactgttgattattcagtcactatgctttgagaaagaacatcgaaggagcttggatgaatcatgaatccaggtaaacctgataaaatcaatggtggccctaatagcttctggaactgggttcaccgtgggatcacatcctctatcggttaacgtacatatttacaacgcaagatacggaggatttatatcggagatggctagactacacaaacgaccctaatccatataccgatggcggctatgtgagtctatggccgctgattgagtcttattcatgttctaacctattgtcatacatttagcgcaagacggcacgggtcgaaatttgtttgaaaccggcaacttggtaagttcacgagaaaaggaggtcattcaaactgacagccatctctttcctagctggaggacttgtatgagccactctgctttccactttattacttcataccatcaaaaacacagagagaaggaagggagaagccgtggtagttcctatttaccatttcttctccatgcatgcatatgttattcttgatgatcttttgttgtactttttatttgaatccatactacttgcgaaactaagtcttacttcacggaaaggaaagacttaggaatggcaacgtcgaaaggagccctggggattgtctgaccgactcgtaagcccttgccctagccaccagctacgcatcttaggggccacagttcggaggatgatgaaatccgcagaggaacaagaaatatccatacaaaccatgcgtaaggcagactaggcttccttatgcgagtggaactccagtaagccccattggcattggcatcgggggctgggtcggctcgactccgtacaccgtacagtacggagtacaacatacatgttggcaatgccccaaaagttctcgtgagaaaagagtaataggcttgaatatcacccaaagatcttcaatcaatacagtggggctgagtgatagcgtggtgggaacagtgcgtagatgaaccaagctgtccctggggagttgcaaatagccatgtcacaaatgtcaattgttatatacaacatacaacaatggctgtccggaaattactccgttatactccattgtagtgcgtatttagggcgaaatagtgtcttggctatctaggctatctaggccattttggacggagtagcacacgggtagaggacgcgcggatgtggggaatggagggatcacagacgagtgagaggcagggatcactgcttcggaagtcttggcactggcacggttgtactccagctctctgtacactggattgggagtacaacgttgtaggaatcaccatgctaaattggtattggaagggatagattgccacggaggcatgttggccctatatagcttcgtacctggatataatttccaaccccttgaagttacagtgggaccagacccctacaggtatatgtgaatgcacgtgactttcgccaaatggaccctgcaacgtcatcgatcgtctttcaggccccttagagaattggccctgtccattttcatcccatggaaccatgatcgcccatttgacccttatcttcccgttcttttcattttcttcctcttcctcttcctcttcctctcctccatccctctccataccacctgggcatatttataccgcactttcatccgcctgcgaccgtgggcccttgattgtgttctagaccaaattcttatctccgcaatgcggtagaagccgacaaaatctcacaacacaaaaaatgctattcagtgcccgagatgggtctgttcctggggcgtcatgggcctggaaaaaggtgctgcggtttggagctgtcttcctgtttgtggtaggatttgccgctgtactatggccctcggtcgagccagtgaagctgcctctgcagacagtttccaacaacattaccgtcggccccgatgtcttatgcgatctcgactacgacaaattggaaagcctagacgttgtcaatgtcgcccaatacacccgccgagaaatcgtactcgatatgacggacgaaccagtgccctacacacagtggcttgagcaaccgttcttggaagtgccaaagggcactgagggagcagcggacgggtgctcaattcccgccccagtgtccttgcgggtcccacagccaccgaaattggcggacgcgtcacacatcgattttggcgtcgcgaccagtgtcgagagattgaatgagtctctggatgcattcgctcactgggctggatactcgcgctgtcgcattttcgcgctgattgaaccggatcactcggagaacggaaaacgggatgtcttgaccaaggccgactcgctggggatcaacctccacatcagtgaggtggaggatgactacctcaaccgatacttcgcactcatccctcttttgaaggagaatgcgcgggaaacaacccgatggggctgtattatcgacgacgacacattcttcctgtcaatgcccagactggtggatgcgctcgccaaatacgaccacaccacctctatgtatattggcggattgtcagagtctatcccgcaaattgcggcattcggaatgattggatttggaggtgcaggcgtcttcttatcgaaacctctcttggtggaaatgaccaacgtgtacgacaagtgttctgcgatggatttcacaggcgatcgtcgcatcgccatctgcgtgtaccgctacacccagacccggctgacggtggaccaccgtctaagacagttggacctgatgcacgacgcctctggattcttcgagtccggccgcgagccaccgctcacagtgcaccactggaagtcctggttccacgccgacatgccgaagctagcggtggtcgccgagctatgcggcgacagctgcctcctccgcaaatggcactttggggacggttggatcttgacgaacgggttctcggtcatcaagtatcacgccgacccagaccaggacgacttcgccatggagcagacctgggacgcccacaatggcgccaatgacgaatcttacctgcacgaattgggtcccctccgccgcaaggacgagcataaaaggtcattccaactgcaggatgccgttcacgaggagaacgaccgtgtcactcagtggtatgtcatgcgcgatgagaaaaacggtgatcaaatcttggagctgtcatggcgcaagagataaatagttttgttttgccttgtgcatgtacagtacgtgtacgggctcctttatatggtcttctggccccggcggtctgctggatcaataagcccaacttcaggcgcatgggcgcatgggcaaaggaatgccactttgcatggagtttcgtttcgttgtttatagatgatagacaccttttttggctaccctaatgagttgaataatgtgatatggatgtttggattacctcttctggtgcaagattgtagcccttgaagatatacctgaggaacggccctctctcgagtactccgtacctaggctgcttaatcttggcgtggctcgactccaagtttggctgttctagcaccgacgcaggcagttcttagttcgggtattggggtaacagcttcatcattcaaggcctcgatcggctcattcgagccttttcgatgtatgactaaatgcacgtgtctaccaggtatgactttacacatctatagaggtcagtgacgatagatggtagataaagcaaagagcaagtggaaggacccgcctgtctaccatggtaagcaaggctgtcaaagcccctggaggccatagctcaccgatagaaattatgccgtaccatggaaccaatgaatatgccagtcccttgcatatacctagccacacagctatagtcttttgtgactggcgtacagataggtgtcaaacatgtggtttgtagttctatatagaccgagcgttttatttctttccttctctgcggatatatccgaaatatatatttacaagaaccagcttttcaacctctattattgtaaacctactttaacaccataactacaatgttagactgaaccagctagttatacaacaagccatagatatattatatatgcgagccgagagtcacgagaacaagaaacaaaccccctttcgtagatgtacacctcaattcgcgaacacacggggtatcatttgaccaccgtctatcggagacaataacggcttgtagtaacatttagtacggaatacggcataggggaatgccgtgacccagcgaagatcctatggaacccctgaagatcgatcggcgttgactgtcgatcgagatactcggtacggagtacggagtccatactccaatgtaacggatgtgagaccaagtggagtaatcagtaagcagtgagcagtaattactaattacccagtactacttggtatccatagacagtacggagtacctaagcagttaagaccaaggtatacgatccggagctatttgatattccacttattaccagtgacaacctgcatcaagttccatcgtcccatcgaagagagccagatgcgcaattttgagtcatcggaaggcagtcaagactagaataagagatgggaagttaaagacgtgctgtttcagtctgcatcgcccgtatccatcgatgagatattttcctcataccgggtcccctcccggtggaacatggatcatagtgcaacgcaatgcttcagggtcgtctgcatgcttctacgccacgtgtttggtacggagtatattttggtgccagggatagcatattttctgcaattggtctcgcgcagcaggctgagacgagctagtgttgaattatctgtgactatttaccttggtgtgatgagttaggcacatcagtgggccagtgctcaatttccccaggagaaagggtgacatcagagtggaatctgcgacagagacagaaaatcgggccatttggtcatagcgtacgcggctgttcctggattttgcggatatttgttttctctttttcttggtacggagtacatatatacatatgtacatatctggttatgtccacgggtactccggaggttgcccaaaatgtgtgtctgatcttccaatacatacaacatagagttacctagcctccgggagggaaaattcctcctaatttgtcagaaaccaaccttgcagtcataaaacatacccaaaactgacctgtacaggacatgctccatcccaggggctacggaggtacaggctgaaaatgttctactaatagaaatatggagactagcgtgtctcagccacaaccatgtgccagccatccaatatgcgtcggcctgacccgccctagttcgattttccgttggcgattgcgcaaaatcaaggaaactactccgtacaatatagtcaatggcgaactataatagatcgtcttgtcagccattggttgaccaagtcccctaagatgccagcattttgtttattcggctttacacggatggtatttacaaaacattgtagaggggagataatctccgcaactccccgcaggcaggacccgggttgacaccaaaccccggcaagtgcagatgatgggtgtcgtcattttcgtcacagttgccagggtatgcgttagcttcgtgaggggctgagaacggtaggtgtgtgagaaagagcgtgagaggataatcgcgccaatgaagaggaatagccttgaacagtcacctaggcagaacatgactggaccagtcatcctgcccagatggtgcccaactccccccctttttctggagttttattttattttgcctctaggcagatacctgtcggggtctgtttactttcttttatttttatttcttttttcctacattaatccctcgaggtgaaaggtatagtgcatagtcagggaggatatcctggtaaggctccgaaccgtgcgcaagatgggggccgcgcatgtctttcttttttctttttttttcttctacggcttctacggatgttccaaaatccttctggcggccttctggaaggcaaggagaaggcttggcggagccatccgtgccgtcttttgtggcagtaaagtgggttcccagaggctgaagccagccggtgccttctagtgtcccccggaagggaaaaggggcgaataagatgggttgtgtaattaccgatgcagactggattagctccactgcatcggagtccaggtacctaagaaaagaagaggggaaacagagtgagaatagaaagtcgaagtgtagttcgtcctaccgacagtgtaacccatatatgttgtatgctgcgtgaggtacggacaggaaaggttaccatcgtgatagtggaaaccttctagaagggtataaatctcgattttgcgctaacaatagtcgggatagactatcgaggtacggtaatctccttccacttgtacaaaaataagtatatcactcaatgtgtcgcaccatgagaaacctgcatgtcatcgttgatcaccgaggcctccaattactttttttttttctgtctttttggctttcatttttctcattcttttcctttatatttttcctgattattattattattattattttaaatcgcgaaatccggcagatgggaaatgcacgtattttctttttagcttcaggggccgtatgttgtagtttaggcccctttttccatactgtgggtgactttattaacgccttcctactttgattctctattaatccaatcctaacttatccctaaatctggttaatgtctggggaataaacgtcactataatatccagagagaaatttcaggggaccactgttgtatatcgaaaataataaggaaattcttcggatcggcctttcgtatccattttcgcacgggggagaaggtggatccttctggtgcggccaggtttccttctagcgggcttcgctgggtccgactaggagaactagcctttctagaaagggagttgagtttaggaggatgggattatttggagtatacgggaatgggggtatgctaagatatagaagagcaatatagtatcaaaattgatacttgaaatgataataatactaataaatactaataaatacgagtaaataaacccgaaaacaagatcaaaaccaaaaaagacaaagaaacaaaagaagtaaataaaaaaataatatgtacaaaaagatgcaagagacagtggcacctaccacacctaaatcacctaaatcatgtaataatcatatttcctatttctctctctctcctctctctctctcctctctcctctctcctctctcctctcccccctttctcatcttctactttttaacccttcgctttcctttcttttcttctcgatttcttcgatctctttgttatacctttgcccaaccccacttgctccgaattcctattccgaacttctttatttcctcgactcttccctaccatattttaatcttgaagcttccttcaaaaaggtatattttcgctcttaccttcaccgcgatttgtcagtgatgacgcatctcgcctattcgctttggctgcccaaccctctctggcgctgttatcttgggtttcgcgaccacggacaatttccccatctgtgctggcctcgtctttttcgtttccctggaaactcaacgttgcaactggtctcccactgagaaccgcggtgcacaggcgagaagtctacgagcttacagcactgtggtggaaagaactcggaatcgcaatcattttgatcttcgttccatgctgaccatcgacaattttttttcgcatagggatcttgacagggatagtagacctatctccaccttcaccgacaaacaatcacgcgttccgcaattagccgaccacaacattattctttgaggcgagcttggattttcggcagaaagcccatcgttcgacacctcttacgcaaccttgcattccactgcagaaaagtggagaatttaccccgtcccattcttcgctgagggactgtccaagacagaacgtgtaatacaggttcacgcagggtgagtttctggtctaagattctcccggctgcgcattcgcggagtctttgtcaatcgagctcgatctactgtaccgaaaatcggttctgactatatcgtgacttgcagagcttgctacttgtgacccgaatctcccacccgacgacctccatccttcctatcgaccagtccttacgcgtaaaggactccgaaaccaataagctatcggacttcgtcggaatattggtcacggaaggtctgccgaaggacgccttcgaaagcagtccttgaccgcggtcacttggctacttgctgggtcgggtcatggacttcacgacaatcctgaacaggaaaaactccgctgcagccgccgcagcagccgaagcgcagttacaacaacagtactttcaacagagtgcacagttacacaccggagcttctcccaccatgaagagcgaatcaggtggctcggacaaccctgtcaatgcataccctcctcatggtcctccgcccatgcagatggatgctggacttgcggattccttctattatgcacagcccacgggttcaacccctcgaaacatggcctatgcccctgcgggatacgctggcgatccccagatgcagcaggaacctgtcccgcagggaagagcaggggttgaaccaccgccaaagactttccactgctcaacctgcaacaagggcttcgcacggcgcagtgaccttgctcgacatggtatgtaccctaccagatattttggatatttccgagaggcagccactgacaacgtcttagagcgtattcacaccggagttagaccccatgcatgcgagtggccggggtgtggaaagcagttcattcaacgctcggctttaacagtgcactcccgtgtacacactggagagaagcctcatatgtgtgagagatgtggcaaggtgtgtatctttcctctctttttttggttctggctagatctaacagctattcagccctttagcgactcgtcctcgctggccagacatcgtcgcattcactccggcaagcgaccctacaaatgcccgtacgccaactgtcagaagaccttcacgcgccgtacgacgttgacacgccaccaaaaccaccacactgggaccatcgaagaagccgctgctgaaaccgaggcccaattgcggcaaaataaggatcgtggacgtcctggtgaaggaatgttctccgagcacgcttccatccactctacaccgtcacccgcgcagcatccatccatgtcacctggtggcgagcttcccccgctgaatatgcatcgctcagctggcgactactacatgggcaccggtcctatcccgcctcatgtgcgtggggatttcccccaaggcagccctcgggcttccccgactgcgacctctccttcgctgtccagctatggcagtgcgccccacacccggccatccatgacctcgcatccctacgctccgcctcagcctcttgaacccccggccaacagtgatcaccgtcccaatagtgtgaacggcagtccacacatgactagtctcggatgggcctcgccgtctcacggtagcatgccgtcgcccggatcggccaacgacttcacttaccccgagcccactggccctgcgtacccgacatcgatgccgccacacatgtacttccccaattctactattcgtcggcctaccagcaccgagccggagaactacgaaatgaagcctcgaggtgaccactcatggtccactgctgtatgatgcgattcacaatccacgccagtggtctcgcaacagcttgaattttccattatttcctttgttgaataaactcattgcataagccccttgattcccacgagagactacgtctgcgcctctcgattgatttttcttttatttcctttgtttttcttcatgcatttccttatccgtttgtacttatattgatgggaaaccagcgcactggaaggagtcggatggtctgatcgatttattgttttgttccaagatgtcatctcgcctttgcaacccccattttcttttgttaaatgcttgcggatgacattaccgagacacgatcagatgaggaactgcatccatggaatagatagagggttggactaggatcttgggtatggatgggttcgggaaagggtctgggtttgttttagggagactcctgatgccggtgtctggttgggatttagttatgcgtgctttgtccattttgttttctcttctcattgtttcatacatctaattattgtattgcttgtttctttttccttttccattactctcttgtctgtcctatggcgtttgacctttttacttgctctcgacgaataccatctttcaaatgatgttcactaatgtttatattttgtatgatatgtagctagtatcagtacatacatgtacgtatatacatgtacatatgtaggtaccccacatcctcgagtccatccatggaagttgaaaagaaagaccagtcagtttcaccacttacatacggagattctcaatcaaatcctccttcgatactccactatacatccggagtgagtgctccccacctcctgcttaaatacaggacagcggggctgtctagctgagagccaccgtccgcattccttagtgcctctagacaagacttgtcgaggcctagaatgattggactaggggagaagtagtactcagagtcagctcatatgacgtgtggcctactgtgttgtctgtgctcctcggtgggccgtactgtgactgatttcctctcaagaggattcccccatgagctgaaccctctcgaaacgatttagctgggactggtgttatgttagcgtcctctcatagcacaccatacaggatgctctacatgggcctatctcaggtacaagacagtctttcatcccgttattactttgttaatattctctcggggcactatatatcttgcctgtatcgtgctcttggtacggtggctcgcagggcgaacaacctggaatgtctataacattattggtcagcaaaatttagaatatttttcggcgctaagtagcattccgcaacccgcctttttcacgctatatattataataatatatcaaatagatcggaattggtatatactagtaagatctctcaattagaatcagtactcaacgtagtgctacccggattaaaaaccgtagggatcaaattaggtataaggtaatccacggccaaccggttaaacgatcaaccggttagccccaaaacaccatactaaatgcgatttttcaggtcacggtatatcaataaccagaagcagtttttgtatgattcttagtgccatacaaattcttaatatttgaaacagtgtagtataaccgaaatattcaaaaaaaggattatttacctaggttgccaaaaatacgcttcaatcgagggatatacagtcatgggtatttgtacctctacatatgtaccattgaccgctttttcataccgcctgcctattcccaccagtataaccgcgcgcgtatagtatactagttttatactacaccctttccccctcttttcttataaaaaaagcagagattatgccgcaccgagtagaagaggttaagacgaacgttggcatactacctaggtggttagtagctagttagaaaatccgagaaattttaaccggcagaaaaagagtgggacctaaagtactggggtgcaaatactcatggcaacatgacagtagatatatgtattaatattagttatcacaccttgaattatttctcgacctgataaaaatacttagtatattatatcaaacactaagatacccctaggactatactctttaccttaggggttaaaatatgaagttgtgaaaagtcgcatttagtatagtgtttggggctaaccggttgatcgtgttaactggttggccgtggattatgttacctgactcctacggccttgtgggtccccgcggtatatcttgcttctcgatacgataggtaataagcgctattctgggatctaaaaataaaagaaaattcatgttctatcttcagcgctaaatcaaacgtaaaccattgtcacgttctttagccttattggactacacgtactacgatcggcatactatccagttaaataaggtactggtcacagtgttggtaacagggggtttttagtgttatacgctacggcgtcctctgtttctcaaattaattttagtcaacgaatggctaatagtacatcaaggtcaggataggccatacagccactatttagtgttgggcgtgccgggcagtgtatgttgggcggtagttggttcaggcctcgttacgccttagcctatcgatcagagtgtatgatatagtggacagtagcaccattatgtataaatatctggtttatgtccttctcaattttgatttctctcatacaacaacacgcattctctcgccttctacctctatcgactgcgaaatatataagctggtgtctacttcaaaactgtctcatctctttatctcgttgtatcttatatcgatttcggttgccgacatccttatcacttgatctatctctcaagagctcccggttcctaggtgtaagaggacattttctgctttattcaaatctcctaggggaaagaagtcttatgctgacctactagctgtacagcaggaataattcgcttccacaatgaatgatccgaactgcagtcaatgcggcggggatggctaatggaaggaagaagctacgcaggtggaatatgcaactcagagaaatagataaatggactctggagaggagaaaagaagaagagagagggggaagctatctgcatacacatgaggaaagtcctaggagcggggagtcacgtgataagcacgtgaccaccccaacacccccctttaggactgacctagatacccccattcctactctccatataaaaacctctcttttttttttttttcaacatacagtctttactgcctttcctacgtattattacactcctttctctattagtaaattgcatatagatcactaaagacctagtatatacacgaatctgttatatacttccttatcgagagcttttgtgaacccgtccgctatattatatatcgtgttaacacgtagcagattgatcttctctctaaagattgcgtccttaacgaagaactagcgtatattaagctatcttatactatttttgtaagagcgctttcctataagaagctaggtgttgatattatccgttaagataacgataggttttgttatattcggtaggtttaatatagtggcgatttttattagctattaggtatcccttaccggtctattaagagcgtaccactctactactatcgataatagtgctataattgtctgcttccttaaataccacctaattagtgcaccgccgaagaaccagatagccccctctatagacttcgtattaggctagtctctatataaggcgtctatatatataaagaaagttatatcctagattctcccgagcgttatataaagctctattatcccttttaggtatctatagacctatcggatagcttatatattattagtggtaggtgctatagagcggtgttataattttataactataaacttaatatccggtcttatctctatagtgagctagtttagtctcctaataagagatctatacaatatataatctttatcgtgtaaacgggtctccgggttattattattaacctcctatttccggcttagtaatagcgggataggggttagtgtgtataactatatttctataagacgtagcgcttctagggtataagctttctaagatattataatagtcttcttactatagtcccgagaaatagcgctaccgagaaagcgtaaaggctctcctagatctttgatttcgaactactccttcgtctagtggtaaatctactacacttccgtatctattagtatagtagtaataaaattatctatataaactagcaaaaactatactattacgccttaaccttttatatatatataaggatcgttatcgagtgcgtaaaaattaatcttatttaatctagtatctagctctttattctataaagctactaaatcacgaagtccgtatagagcctattttaattaataaacctagcctttaattctaatatccggtttatagtactcgaaactaaggggttaaaatatatagactatttcctaattatcttataatatatttagatatactataactatattaaattgcttctatttataattctattatataataatagtgaaaataatcttaataagtgtgttttagacgataggtacgtagaaaatagagtcttccttctttatctagaagttcctatacactacctatcttactttaaaactatacaccttattatctttagtgactttaagattatatacctattagcttagaagcggagtgattcctagcggtcttcgaataatatcgaaagtgtcttttatatagagattattaatctaactctctatagtagcttactatctatctacaaatttagactttagagcttacttataggactaagggatatcgacgtctttaatataaagcggcttgctattataaataaagggagtgctttacttagtaagaaccttcgacactactagccttcctctctatatatcctacttatcctatccctatctagatccctcgctagcactattattaccctatagaacgtccggtctcacgcgtattatcttcgtcttcggtttcggtagagggttcggtctcgggggacgtagggggttcttagagaagctgtagcgctccggtaagcgtctcgtacggcttaaacggcggggaataaactacggaattgtcttatcgctactaattataataacggacggctaacaatcctattaaatcatactctaatcggtctcgattgtggaaatattataagaaatctcttcttatagctgtgaaatctcctcttcttattgttaaaaaggctcctaagaaatctcttcctattattaacaaaaagtggactaagaaggctcttcctctctataagagagagctttataagaaatctcttactaagtgtgtagaactagttttagagtctcctactatagtgtatcctctctaaatacacctagcaaatatagtgttagtgatttaacaactactactagcggtgtaagatctcgctaaattagtgtctcttcctctcggtaagaaaacacctatctctcttcctactaagagaccacctatctctcttcttatagagaaactacctatttaattagtttatatataaaggtcttataagtatcctcactatcgtcacgctcgatcgactagtaaataggggattccgggatcacttctagcactagaggctttataacttactttctaggctaaggtagtagtagaggaagaactaacacttccacactaagctaatctatatgctttctaatcaattcccgagcttagggttagagcgtaggacgttatatagcctatagtgtatcgtgcggtgtagcctactatttagactactatttagcctattatatcggctatctctttactagcttttggaagataggctatcgaattagagatatatcctcgacttcctagatcctagttaacactttaggtgttagtggtatagtctatactcttcctagtgtgttcggtcccactaagggttgcttttactaaattgttagctttattagaccttaaataataggttctagcttcctattagtaataataacctatagaactaattttagttaaatcctaggtcttttaaatagctatttacccttttcaatctagggtcctccctttttatagagtgctccggtgtcgttattatccgaattagggtcttttagtgctagctttctagtcggcgctagaccccctttctagtcattatccgatctagtgttcttatctagtttatctaggaaagtgacgtcctaggagcgtacaatctcttttataataggattctataccttaaagatatagccgttttctccttcgtaaccaattagatatccccggaatactcgtgctcctaacttctctaactatatataagtctctcttagaatatagacaaaaacaattgctccctatagacgaaggtgctttagattaaccttcgtttctcctatactaaggtcttactactagataataattagggttttacctattttagggtttactaggcagttgtgaatataaatagcggtatttatataaaaaggctagagagagtctagaagctttatatctatatttatcgtcctctatatttgattaatatagcctcctatacgctccgctatactattaggtttagatatatacgcgggtataagttcaaaaatcattccctcactctccccctatatctagaatttatagaattcgcttcctccgttaatacgctagatagctaggtatctaccgcggagaagcttctaccgcttataaaatttaattatatattccgcaatcttatctttagtgcgaaaataggggccctcggtgtatcgggtatagtcgtctataataggaacctaatatttctctctaccgggtccggggggatttatagtctaggtgttagtataaaatttcatactaggctttttaatatatcgttatttgtctcttaagatccgtttcttcgctttcctaagctaatatacttcacaattaaagtcgtaaagttcaacctagttatccttattaagaagaatagtatccgctaaagaagctttaatatacggtttaccgatataccctagatatctatatatttcgtatatagagactaccttactaactctattaaggtctttatctttatcgttagacttagagctagaattaggctcgtaaaaatacgtcttttagacctttattaaaatctctatttttatatcttcggcttcgctctttataccataaaaaagcgggctatcaatctatagaagtccgctaaccttcttcactaggccgacttcctcccggtttacacgtacaagctttaacgtgatcgggttataataaatcctataatctacttctagagtattcgtagaaagtagtctatctttagttaataggttatagtaggtagagataaggattgttctcactttcctagtcgaagtcttaatctagactagggccttactatatactattacgaattaaatattgctattagcattagtatagctatatagcgtttctctagctttatacttagtatatttatagaaatctttatagtgactagtgatagttttagaagcaccactatctagtatctatatcttatccgcggagtgtgcggagtttacccgagctacactagccttattttcgttcttcttattatttgctaaccgctttataatactataacactagatattcttcaccggtttctacccttcgaaaataaggtcttctataaggtggtagtatatctttactagataaccttcgatactatagtagggatatttgtagctattaacgtactatagttattagtttctttattattccgcccactagtcgatagtcttaccttttactagaccgtttttaaagaaagataacgtctctctatctatctttatatctatcttagtatctgacgaagtattatatccgccgccgcgactatatctactataaccgcgtccccttctaccgcgctagttctctatcttccgcgctacatttactatagtagaggtgcttaataaagtaggtgtatcacaagcttctataattagctttttatataagctattaaagtcgtcctttataacactctctagaatagtatcctttattatctagtaggtgaactttaccgaatctagttctccttcgagattataaagtataataaatattataccgaaagggtgcggctctaccttatataggcctagttagttatactacgtctaatacgccgtaatataggtattagcgctagagaaatctaatctccggatcttataaaacttaataactttatatctaatattatctatgatttctacaccacgaacgagagtctctacttcgcgtattataatatctatataacgtggaaaggcttccactcctcctttaagaatagtaataatctcttaatctagcagactcttaatctatctataggcaatttttgactagtattcccaaatatcgtactcggggtctgtctcctatagtcggggcagtttataattagccactttatcgatacggaccatactaagtccgttctcgatctagcgtttctatctagtaagattgctactatctagtaataacttgatacctttattcaatttaatttccttctcctccgggaggtttgtgccctaggtccgaatcggtcgtttcgctacgccggcggaggaagaaggttaggtttaggtgcgaggtgcggggagagagcgtgataagccctcaccggcgttatcatcctcggaatcagtcatattgactggctaagaaaaatgcagagtcttctcgatagaaagatctccggttagaagtagagagacgcgtcttcgctgactctcgctaagaaatgcagagttttcacgatagaaaaatctctgtttgtgaatatagagctctcttgataagaaatctctgataaagaaatgcggcctgtgatgatatcgatgaccttcactaccttgatgatggattcgatgatccttagtggggtgcgggacgggccgaagcgcgacccacaatgaaaattctgattcgctcagttaaaaattgatgaaaattgatgatactcggagtcctcgagcaaagggcttcataacctgatggaaggaagaagctacgcaggtggaatatgcaactcagagaaatagataaatggactctggagaggagaaaagaagaagagagagggggaagctatctgcatacatatgaggaaagtcctgggagcggggagtcacgtgataagcacgtgaccaccccaacaatggcttttacgaaaaaaccgtcgaagaatgggtaaccgttccgtgcaactgcggtaatgacctagactgcgaagagtgcgagggctctggaacctacacccagtggcaagcgagacgggaggaaaggacatgtgactgtcgaggtgacgttgactatgattcctgaagcctgttgggaactcaaatggtcgggttacgactgccagagtatacagcgatattcgaaatcagacataccaacatcctcacgcggattagttcccgaaccctaatccgaaacgcgctagtctaactttagtttctccctcagaatccctgctgaaatgtatcgtattgcctaacagtggtcgatgaagtaattgttataatactgtatcgctccatggaaccgcgtagaatctttattgcaataggccaaacagagcgacagttctgggggtctggcaagatcgcctctctttctcttccatcgcaggcagccttcgtccacgctcgttttacgtacactagaggctgtgctcatgcctgtagagaactaacctttgataggagatcatgctggcttgtttccatggttcatcttccttctgtgatgttcattcgctaatagtgtccgttgatgtccactgaggcgttccagggactatgactttatgcggagatgatccaaagctcttagcacactgattacatttcttcgacggaggaggctgaatcatgggtgcacaactagcagtatactccggctcgtactttcacagcccctacgccacgcaatccacctacacttccccccgtcctagattgcccgagagcggacctgattagagaggtcaatcacgaccagatagtctcgggttgttccagctttccagtgtagtgaagcatggaatgaaaaaaagattcttgacgcagattatatacaggatgctattctcaaacccgcccagatcggtattccaaggcaaaaaaaaactgtggttgactgccgagcagtggaatcaatactccggagggtgccttcagaatggtcatctactgacccttcagtagaaccgtgttggtatccgctttgggtgaaccaaatgtatgatttgcttcactaggactggagcttgacgtatttttgatgattaggtacgaaccatcatgggaagctgcacatttaagtctgctgtagcaatcctgctggggggtccccgagcttcactgttttattcttgcagccggacgccagcaactggccatcgcacacaaatatcgtcagaacatcccctccctcgaaaggaacatcatcgtcgttgagagggagagccaggctccctccgcgacggtttgttcccgctcaccgcgggacccatttcatgtacataccatgtacgcttccgcatatctacatcttcctctccaggatataagaagtgccgcaggcccgcctggggccctcacggcactgtggccctccgagaacgcgaaccctgcgctctcttcacaacaaggcctacatcaccggtgcccagaccgcgagtatctcgtagggctaaaatatctatctcactcgtctccattcgtgaatgtgtagcaatggttggaatagagtaaacacacaaaaagaaattattcggactatttattcgacgaaaaatataggaacaaaatccgccccgctgcactgcctagagcaagagttctatctttcactgccgaacacccagtgcgatactcaggaggcagccacagtgatttttgtcccgaatgactacccactcattgtttcgcacggatatcatgtcactctcttggtttgattcgaagatatcatcctgaaagctaggcctgatgttgtagaaaccaagatctgaatgtatacgacacccatctttggaaaatttcagcgtggtgatagatctctcagcgtgtaatgtttgctttagggtgcccgtagtgatatcccagagtctggtttctgaaccattgccgccagacgccaatacctggccatcgggggggaatgacactgagcaaaccgaggctaaataccttcgagggtcttctgtagagcgcctgttttgacaacccagaggcggacagctataccggagccagatattgaacgagagaatatactatagtaaaccaatactataactatatagagagatagaaaagtaaagcgagtgtgttttgtaaagagtaggatctacttagctatttaacctaactatagtaggcttacaaactagtgccactagctaactagtaagtaatacctaagtgcctaaggtggctactacatagagaaagtaaaatacaaaataaatatgtaggaagggagtccggctggcaccttgttttcttagttagagagcatgcaaataaaaggggattatagtgtagacctatagtactgattgactgtacttgatcgattatcctaagaactttagatataaggcccaaaacgcttattgcttctacccaataaaggaggtgctccttaagaaatataaatgcgtcacgtatcactaagtggaattatttgctttgactgaggtgataatctagaagcgacaagaccattgtagctctagaggaagatattagcgaataacttataattcgatatttatatagtgagttctattatatcgaagcgtatagatatttgtcttaacctttggcgtatacaaaaggtatcttgcagtcaattttgatagatctcttacttatccacctataagagagttatctgccgtatctccggatcgagaaggaagtccctaaatgataggtagacgggccgaattagcatttccgtatccttcggtatacaaataaccgagtgaagtctattcaatctcaaatcaattagtctctcagagacactaagtagtctcgagagtgacgtgatagaaagggggctcttaagtatcactattgcacctactatttcctaaaactctcgaactagctatattttcggtttctattctagttgttgatggaaggaagaagctacgcagtggaatatgcaactcagagaaataaatagatggactctggagaggagaaaagaagaagagagagagggaagctatctacaaacatgaggaagtcctagagagcgggagtcacgtgataagcacgtgaccaccctaacacccccctttaggactgacctagatacccccattcctactctctatacaaatatacagtctttactgcctttcctacgtattattacactcctttctctattggtaaattatatatagaccactaaaggcctagtatatacacgaatctgtcatatacttccttatcgagagcttttgtgaacctatccgccatattgtgtatcgtattaacacgtagcagattgatcttctctctaaagattgcgtccttaacgaaaaactagcgtatatcaagctatcttatactatttttataagagcgctttcctataagaagctgggtgttgatattatccgttaagataacgataggttttgctacattcggtaggtttaatacggtggcgatttttattagctattaggcatcccttgccggtctattaagagcgcaccactccgctactatcgaagatagtgctataattgtctacttccttaaatactacctaattagtgtaccgccgaagaactagatagccccctctatagacttcgtattaggctagtctctatataaggcgtctatatatacaaagaaagtcatatcctagattcttctaagcgttatataaagctctattgtcccttttaggtatctatagacctatcggatagcttgtatattattagtggtaggagctatagagcggtgttataattttataaccgtaaacttaatatccggtcttatctctatagtgagctagtttagtctcctaataagagatctatataatatatgatctttatcgtataaacgggtctccgggtcattattattaacctcctatttccggcttagtgatagcgggataggggttagtgtatataactacatttctataagatatagcgcttctagggtgtaagctttctaagatattgtaatagtcttcttactatagtcccgagaaatagcgctaccgagaaagcgtaaaggctctcctatatctttaatttcgaactactcctttatctagtggtaaatctactacacttccgtatctattagtacggtagtaataaaattatctatataaactagcaaaaaccatactattacgccttaaccttttatatatatataaggatcgtcgtcgagtgcgtaaaaatcaatcttatttaatctagtatctagctctttattctataaagctactaaatcacgaagtccgtatagagcctattttaattgataaacctagcctttaattctaatatccggtttatagtactcgaaactaaggggttaaaatatatagactatttcctaattatctcgtgatatatttagatatactacaactatatcaaattgcttctatttataattccgttatataataatagtgaaaatgatcttaataagtgtgttttagacgatagatacgtagaaaatagagtcttccttctttatctagaagttcccgcacactacctatcttactttaaaactatacaccttattgtctttagtaactttaagattatacacctattagcttagaagcggagtgattcctagcggtcttcgaataatatcgaaagtgtcttttatatagagattatcaatctaactctctatagtagcttactatctatctacaaatttggactttagagcttacttataggactaagggatatcgacgtctttaatataaagcggcttaccgttataaataaagggagtgctttgcttagtaagaaccttcgacactactagccttcctctctatatatcctacttatcctatccctatccagatccctcgctagcactattattaccctacggaacgtccggtctcacacgtattatcttcgtcttcggtttcggtagaggattcggtcttaggggacgtagggggttctcggggaagccgtagcgctctagtaagcgtctcgtgcggcttaaacggcggggaataaactacggaattgtcttatcgctactaattgtgacgacggacagctaacgatcctattgaattatactctaatcggtctcgatcgtggaaatatcacgagaaatctcttcttatagctatgaaatctcctcttcttattattaaaaaggctcttaagaaatctcttcctattattgataaaaagtggactaagaaggctcttcctctctataagagagagctttataagaaatctcttactaagtgtgtagaactagttttagagtctcctactacggtgtatcctctctaaatacacctagcaaatgtagtgttagtgatttaacaactactactagcggtgtaagatctcgctaaattggtatctcttcctctcggtaagaaaacacctatctctcttcctactaagagactacctatctctcttcttacggagaaactacctatttgattggtttatatataaaggtcttataagtatccttactatcgtcacgctcgatcgactagtgaataggggattctaggatcacttctagcactagaggctttatagcttactttctaggctaaggtagtggtagaggaagaactaacacttctatactaagctaatctatatactttctaatcaattcccgagcttagggttagagcgtaggacgttatatagcctatagtgtatcgtgcggtgtagcctactatttagactactatttagcctattatatcggctatctctttactagcttttagaagataggctatcgaattagagatatatcctcgacttcctagatcctagttaacactttaggtgttagtggtatagtctatactcttcctagtgtgttcggtcccactaagggttacttttactaaattattagctttattagaccttaaatagtaggttctagcttcctattagtaataataacctacggaactagccttagttaaatcctaggtcttttaaatagctattttccctttttaatctaggttattactagtcctccttattcgtaaagtgctccggtgttattattgtccgaattagggtcttttagtgctagctttctagccggtgctagaccccccttcttatcgttatccggacctttcttatctagtttatctaggaaagtgacgtcccgggagcgtacaatttccttcgtgataggattctataccttaaagatatagccgttttctctttcgtaactaattagatatccctagaatgcttatactcctaacttctctaactaaatataagtctctcttagaatatagacaaaaacaattgctccctatagataaaggtgctttagattgaccttcgtttctcctataccgagatcttactactaggtaataattggggttttgcctattttagggtttactaggcggttgtgaatataaatagcggtatttacacaaaaaggctagagagagtctagaagcttagtatctatatttatcgtcctctatatttagttaatatagcctcctatacgctccgctacactattaggcttaggtgtgtacgcgggtgtgagttcaaaaatcattccctcactctccccctatatctagaacttatagaattcgcttcctccgttaatacgctagatagctaggtatctgctatagagaagcttctattgatggcggcaacgagaacagggacagagaaagactgtattcgctatctgacagatgactgggggaggaagaaggaagagaggaagacagacagagagagagctggagacaaacaaacagataggcatgactagcctgaacaaataggcagccagctaggtcacatgacccaggctccaacacccccccttaggctagacatccactaacaaacactctcctcgcccccctataacaaaaagaaaactactatctctagtatcaaattcaccactagtatcatatctagtatcacttctttctatcctttgtatccttcttctccattcgtgctgtagcgtagcactagacctccgggaacggctcctatccattaaaaacgaattcttccattaggtggaagtatgcctttatagggtgtccatcgagacggcagtgtgtgcacttagttccgttgatatactaaggctgctgataacgctagcgcttagcctattcgtcaatgttagctcctttcgggggtgctctacgaagctgcttctcttccggtttatcctttgcttcacctttatcatcaactttgttatcttccttcggtttccgccagttatttctacgtctaatacggcctccacgaccgcgctgtccacgtccgccgcgtgaagaagacgagggtgacgaagaacgggttatcttcgctagactagggcttgtctcctctatagttatattcgactcaataatcagctctttgtagtatttaccaaagtcatttattgtggtttcggtcgggacttggcgttttagagtattaaaagtgaaattcacgctcgggagctctttacgaagtgcgtgaagtatagtgtaaagtgtagcaaaagggtgcggtgtgacaccgtaacgtccgagaatattgaattgcctctaataagccataatgtagtccttcgccgtagtgtaattccctcgtttcaatttgtcgaattttaagacctccgcaccgacgtttaaaaccttattgtcaccgcttacaatccgggtgatctcctttatcaagtcatcggcgtactccgggaattgttgaattgaaccttcgaggatagtcgtgattttattgtctagtgtcgacgagatctagccgagggtgtagacggactagtaatactaggtatcgtactccgggtcgtcttcctttggtttcggtaggttgaaatttataacgttctcgatccgggtcatccgtagtctattcgtgatttcgcgcttctagcgcacaaagttcgatctatcaacgcgtaaggtgtaggctttcatctattttatatcagttttctcactaaggcgggttccttacgtaacaggttagggttagggtacagggagccgacgagagctctccccgcgggatctagatccagatctagtgtcagacatcttcaaatcaggtttacttctaacgaacactcgcgagtaggaaaaatcagggtatcaaggtttcgcttccagcggacaaatcgcgagcgagaaaaacaggggttgcttccagcgaacaatcgcgagtagggtatcgagtatcgaatgtttcgaggtttcgagggttcgcttctagcggacaaatcgcgagcgagaaaggttaagggtgctactagcgaacaatcgcgagcaaaaagtgggtcgacgacgagggtggagctgcttctagcggacagtcgcgagctaatctctgagaaaaagtggggccgtgaaaactctgtagatcagatcagatttccacgtggggtgtcgcacaaatgacgtcactaaagcagcaaaagcattagctttatcaaccagagataaaaactgatagagtctcagttaggaaaaagcgagggctcagaacctgatggcggcaacgagaacagggacagagaaagactgtattcgctatctgacagatgactgggggaggaagaaggaagagaggaagacagacagagagagagctggagacaaacaaacagacaggcatgactagcctgaacaaacaggcagccagccaggtcatatgacccaggctccaacactatcgcttacaaaatttgatcatatattccgtaatcttatctttagtgcgaaaataggggccctcggtgtatcgggtatagtcgtctataataggaacccaatatttctctccaccgggtccggggggatttatagtctaggtattagtataaaattttatactaggctttttaatatatcgttatttgtctctcgagatccgcttcttcgctttcccgagctaatatactttataatcaaagtcgtaaagcttaacctagttatctttattaagaagaatagtatccgctaaagaagctttaatatacagtttgccgatatatcctagatatctatatatttcgtacgtagagactgccttactaactctattaaggtctttatctttatcgttagacttagagctagaattaggctcgtaaaaatacgtcttttagaccttagttgaaatctctatttttatattctctttctttatatcttcggcttcgctcttcacactataaaaaagcgggctgtcaatctatagaagtccgctaaccttcttcactaggccgactttctcccggtttacacgtataagctttaacgtaatcgggttataataaatcctataatctacttctaaagtatttatagaaagtagtctatctttagttaataggttatagtaggtagagataaggattgttctcactttcctagtcgaagtcttaatctagactagggccttactatatactattacgaattaaatattactattagtattagtatagctatatagcgtttctctagctttatacttagtatatttataaagatctttacagtgactagtgatagttttagaagtaccactatctagtatctatatcttatctatagagcgtacggagtttgcccgagctatactagctttgccttcgttcttcttattatttgctaaccgctttacaataccgtaacactagatattctttaccggtttctacccttcgaaaataaggtcttctataaggtagtagtatatctttactagataaccttcgatgctatagtagggacattcgtagctattaacgtactacggttattagtttctttattactctacctactagtcgatagtcttaccttttactagaccgtttttaaagaataactctccctctatctttatatctatcttagtgtccgacgaagtattatatccgccgccgcggccgtgtccgccacgaccgtgtccctatctaccgcgcgggttctctatcttctacgctatatttactatagtagaggcgcttaataaagtaggtatatcacaagcttccacaattagctttttgtataagctattaaagttatccttcgtgacgctctctagaatagtatccttcattgtctagtaggtgaacttcaccgaatctagttctccttcgagatcataaagcataataaatattgcaccgaaagggtacggctctaccttatataggcctagttggttatactacgtctaatacgccgtgatataggtattagcgctagagaaatctaatctccggatcttataaaacttaataacttcacatctaatattatctgtgatttctacactacgaacgagagtctccacttcgcgtattataatatctacataacgtggaaaggcttccactcctccttcaagaatagtgataatctcttaatctagcagactctcaatctatctataggcaatttttaactagtattcctaaatatcgtactcggggtctatctcctatagtcggggcagtttataattagccactttatcgatacggactatactaagtccgttctcgatctagcgtttctatctagcgagattgctactatctagtaataacttaatacctttatttagcttgatttccttctcctctaggaggtttataccctaggtccgaatcggtcgtttcgctataccggtagaggaagaaggttaggtttaggtgcgaggtgcggggagagagcgtaataagccctcaccggcgttgttatcctcggaatcagtcatattaactagctagaaatgtagagtcttctcgatagaaagatctccggtcagaagtagagagacgcgtcttcgctaactctcgctaagaaatgcagagttttcacaatagaaaaatctctatttatgaatatagagctctcttgataagaaatctctgataaagaaatgcggcctataatgatatcgataaccttcactaccttaataataatagattcgatgatccgatttggtggggtgcgggacgggccgaagcgcgacccataataaaaatttgaaaattctgattcgcttagttagacttgataaaaattgatgattttgatgatgctcggagtcctcgagcaaagggcttcataacctgatggaaggaagaagctacgcagtggaatatgcaactcagagaaataaatggatagactctggagaggagaaaagaagaagagagagagggaagctatctacaaacatgaggaagtcctggagagcgggagtcacgtgataagcacgtgaccaccccaacagttgttaataagcctatttagaactagtagatatatcttgcttagttgagatccctcacttcggagggtgaggatctcggtgagctatctatggggtcctactgcggatcatcaaaaacacgatatacggtcgtagcgaagataaatagtggaatagataatacaacaagagcttccaaatccgtgtacctaggccagttgatagggagcggtcgtttctttctgatttttgacggtctctagttgaaaaataaaaatatgtagtgcgctataactgctctatcatagagcgcgaaatcctgatagtcctgatccttgatttccgaaaaccccagccggataggcaacttaggtctgctagtcaagaagattcgtacgcttatagaccttaactcctgtagccacggtagtgaccgaagtatgactcgtacgttattatcgtgcttacactcgtctaacgcgtcaacaactatgattacgattagaatttgctgatcggatgactcgaggactagcagtggttgaagaagtagtttctcgaattgctcttttagcgattttactgcaatatcacggtcgttatagattgcttttcggacactaggtacgatcttaggaaacctaagacctaactatatagctatgtcgggaaaaaccttatagtattcccccggtccccttcacttctcttgaaaaaggagcttgcacctagtcgcttgtcctgcttgaaggattttgaaactgtgcgggaaactgtagatttaccttgcggtgaaacagcctattctgtgattttgcgaaggagctcggttctggtgcctaggagacattcatcctcgtgttgatcctcgtgttgatctatatatgagtcaaactcggccctatgcgcaactagcaacttgtcaagactaaaatcatggcgaatatcttctgctttgcgagccacattggctaggatgatactaaggaggtgtaaaccgatcttacccgagcgatttctgtggagaagtttacctatggccaacctgcaaagataaagtaaaggatgatttgtatctctcgagatcccgaattatccatctcagagcgtttgagcgccacttcaaggcgcgaaagccgaacctccttatcctgttctgccccgtcccaggattaatcttcttttcagtgtcccgaggtctaaaagacaatcagtaatatcactgactaacgacgaggagctgggcagctttgtgctgtctacattagaatcttgcagcaatcctttgagtttctgaagaatctcttcgagacctgcgaccgtccgttgtagggtaataatatcatctcgtgcttccttgacctcctgaacgtaacccccacagatattcacaagaatattcacaataattcccgtgagttgaatgactgcaattacactagctgcagacgaaagtccttccatattgggaaatcactggagactcaatggtaaggtcaagagaaacggggtttgcaggaatcgagacgagaaggatacgcgggaggggcggaccagaaggaggcagaggcggtgaatgaggtatgtatatctattagcgggaatggggaccaaccatctaactcacagatgacgtttaaaagaaatgggtgaggaggtccggtaagagtaagggaagggacacacggactggagacagtagcatgtgtataggggtttcgtgtaaaaaaaatcgttcaaggaggtctcacaaacgtcacgtaaaatacaaggtctattctgggaagcgaaggatctacggccataccatatttagcgtgtttttggctagggttttgaggatcaacacgagagtgtatggtggtatatctgatttcaaatattgctgtataggcgcttttcttacttccgcgctggtacttaaggatggaaggtgataaggctgtgtggcgagtcccgtgacgaggcttggttagcgttgctagatgcccgaagacaggaatccttgtacgccatttgaggccgaaccagtcgtttagttagcttggaaagattcagttcacgtttcttgacctctcaatgacctcttgaagcctatctctacctcttccttcaagtacatactccatgagtgtgaggatggggaaatggagtctacggaacgtggctggatgtattgatgtatgctatagaaggaagaagtaacttcactgggccattgaggtggaagcttagtaaactaggtagctgatccatggataaatcgaacactccgagtcagaaccgtggtaagagaatacaggttgcctcgccagtcacatatgggttaggccgcagtcgataaaaactgataagccctgaccgcacacaacttgagcaagagcttaagcaggaccttagtagtgggacgaatgtacctctccatattatccaagagtctcacgagcctttatatacatacacctccagtatattactggcgatatatttgaccaatgaaggaagtaactacctaggtaactaattaggtaacgtaatccacggccaaccggttaacacgatcaaccggttagccccaaacactatatactaaatgcgacttttcacaacttcatattttaacccccaaggtaaagagtatagtcctaggggtatcttagtacttgatataatatactaagtatttttattaggttgagagatatttcaaggtgtgataatattaatatatatatctatatccctcgattggagcgtatttttggtaaataatccttttttgaatattttagttatactacactatcttaaatgttaagaatttgtatagtactaaaaatcaaacaaaaacggcttctagttatnnnnnnnnnnnnnnnnnnnnnnnnnnnnnnnnnnnnnnnnnnnnnnnnnnnnnnnnnnnnnnnnnnnnnnnnnnnnnnnnnnnnnnnnnnnnnnnnnnnnggggattggtaatatgacccccccccccccatctttacttgacccccccccccctgcctgaaaatgcctgattttcagtaccgccttcccgatcgggtgcgaccaggatttctgccatacgttctgccagtgcagagttttctgccatataattctgccaacactgtaggaattccggtttatatagtaaaaaaacatgcattttaatcagaaaaaaacgtacatttctgccgaattaagcatttgtttacacatataggttaaatgagcttctcaaccaggtccccgcgcgcgctatccccgtcctcggccccgtcctcggccccgtccctgtcctctagtctcggtatcaccactaccagtttcaccactgcttattccacgcctacgtccccttcctcgtcctcgtcctcgactctcctcctataacgaaggatctcggtgtatagaacgatcctacgtgaggggattaggtcaagactgtagttgctgggtgcttgcctacgtgcttgcctgcgtgcttgcctgtgtgcttgggaggttcctggtaccgcgagggcgtcctcgttgacggactggaaggggatcttggatgagaagtatcgggttaagcgggggggcatcgacactatctaagtgctaatgctgatggtatagcgctagttctaaagatcgctgctccgtattgtattactgaatgatatagatatatggaaagctagctatttctttagaattgtaagtgtaaattggtggaactaggggtttgttatcgcctggcggtagataccgtacgtaaaccgctttagtaagcttaattgcgcgtattgaaatccgggtgtaaaggagcttgtaaagctgtgggatatatgctagccttcgaatcttctactccttaattctatactagattttagagaattgatactctatagaccggttaaagctacggagaactcctagtaaatcatgatttaagacccggagaccctactttagtagctaatacgcgctctctatacgggatatagcgatcttattgagatagaggtatttgtaaaggataaaggtcctttcaatcatgaaacagggaatgacaggatgtgcgtagcatgtatcgtaatcaatgcgtgcggggttcgctaggtgatcggccctacttcttagcgcactaggattttcttttaatcctagggccccccgggggccccccctgatttaggataagagttagtcttattatatagaggcaatacactttcattcctatccccgctattcgtatcttacccggttaataggccttatacctaataactatatatctttacaattctaactcttcttcttcaaccgcctaagatataatagctcccccggttacccgtagcggcttataaaataacaccgaagcgcccgagtatctaagtcggatcggtagcgaatcactaacgtctaccctaggcgaggaactaagggagacctaaatctaaagaaactcgcccgagccgaacgacgaaccactcgaggaaaactactagtttattaataagataatccgaagactcgagctttaggctacggagtacgaagtaaaagcggctttataataacgaatccttatagctaaaaaattagttatagaaaataagaaaaagctctaagaactagtaggactatcgaaacgacctcgaaacgatcgcggttcctctatagagagtgagtaaagctagaaaggagagattaagtaggatatcggtaagttcgaagagaactttagtattaagtagagagaagactagttaaataaccttaatatactctttagaggagccccgaagaagtatatcttaggagcctagaaagtccttatagctactaacttcctctacactatatataaaggtaagtaggcgatttataaacgaaagtaccctaaagatatattaaactaggaggccttccgagaatagacgaaaatattacttcgaaatttatataatattattactaatatccttatcctattctaagagataataataaggtcttactaagactctcggaatttcgaaaactatctcgaatcgctagagaatcacctaccgaaatagaccgaagagtaaaaagcctagacactttttataaagctatagaaacccctctaagatattataattataaatagtaacggatcacttcctataaaccgagataagatattaaaattagtatctatcctttactatatccactttatatattagaaaaagaaagactacttaccctaataatataataagcgtaaatagggaaactattatagttcgataccgaattatccccgcaccgaaatattaaggggtcgcggaaaaggatagccttatagaagaagctaatttagaggtagagctagaggacgtagatgttggagcctgggtcatgtgacctggctggctgcctgtttgttcaggctagtcatgcctgtctgtttgtttgtctccagctctctctctgtctgtcttcctctcttccttcttcctcccccagtcatctgtcagatagcgaatacagtctttctctgtccctgttctcgttgccgccatcaggttctgagccctcgctttttcctaactgagactctatcagtttttatctctggttgataaagctgatgcttttgctgctttggtgacgttatttgtgcgataccccacgtggaaatctgatctgatctgtagagttttcacggccccactttttctcggagattagctcgcgactgtccgctggaagtagctccaccctcgtcgtcgacccactttttgctcgcgattgttcgctggtagcacccttgacctttctcgctcgcgatttgtccgctggaagcgaaccctcgaaacctcgaaaccttgataccctgatttttcctgctcgcgagtgttcgctggaagcaaacctgatttaaagatgtctgatactggatctggatctggatcccgcggggagagctctcgtcggctccctacaccctaaccctaacctattacgcaaggaacccgccttagtgagaaaactgatgtgaaatggatgaaagcctgcaccttacgcgttgatagatcgaactttgtgcgctagaagcgcgaaatcacgaatagactacggatgacccggatcgagaatgttatgaattttaacctgccgaaaccaaaggaagacgacccggagtacgatacctagtattactagtctgtctacaccctcggctagatctcgtcgacactagacaataaaatcacgactatcctcgaaggttcaatttaacaattcccggagtacgccgatgacttaataaaggagatcacccggattgtaagcggtgataataaggttttgaacgtcggtgcggaggtcttgaaattcgataaattgaaacgagagaattacactacggcgaaggactatattatagcttattagaggcaattcaatattctcggacgttacggtgttgtaccgcacccttttgctacactttacactatacttcacgcactttgtgaagagctcccgagcgtgaatttcacttttaatactctaaaacgctaagtcccgaccgaaaccacgataaatgactttagtgaatactgcaaagagctgattattgagtcgaacataattacggaggagacaagccctagtctagcgaagataacccgttcttcgtcaccctcgtcttctttacgcggcggacgtggatagcgcggtcgtggaggccgtattggacgtggaaatgactagcggaagccgaaggaagataacaaagttgataataaaggcgaagtaaaggatgaaccggaagagaagcagcttcgtggagcacccccgaaaggagctgatattgacgaatgggctaagcgctagcgttgttagtagccttagtatattaacggaactgagtgcacacactgccgtctcgatagacaccctgtaaaggtatgcttctacctgatagaagaattcgtttttgatggataggagccgttcccggaggtctagtgctacgctatagcacgaatggagaagaaggatgcaaaggatagaaagaagtgatactagatgtgatactggtagtgaatttgatactagagatagtagttttctttttgttataggggggcgaggagagtgtttgttagtggatgtctagcctgagggggggtgttagagcctgggtcatgtgacctggctggctgcctgtttgtttaggctagtcatgcctgtctgtttgtttgtctctagctctctctctgtctgtcttcctctcttccttcttcctcccccagttatctgtcagatagcgaatacagtctttctctgtccctgttctcgttgccgccattagtagatccgatagaagattacaaaatttaataaactctaatataaactcctagactactaaaaaaggaaatagtaccgtttcggtaccggaaggtacctattttatctattaagataagaatcactagataaacgagtacctatagagaggaaccctaatctaagtattaagagtaaattaaactagatagtagggaaaagtagaggagctagattaattcccgataccctagcttaatacccgctaatcgggactatagtacgcctttatataccgattaccttaggagatagtcgcgaaatatatatagatctagacactagcgcggaatataatatagttagtaaggaatttactattaaaaataaattactagctatacctttctcgttcctaacgctaaaaggcgtcgctctagatagactctatatctatagtatattctaggtactatttataataagagattctcgaggcaccgaaaagatagtaaaacgaccctatatcggtatcgatagggacttaaggctaaaaggaagccctatccttttattaaagacctttattaataaattcgacgttatcctataatctagtgtcgataaatagtggttcggagttaaagggttcgaactctagaaaccttataagtttataaagtaatctaagaatatagctattatttacgccctaattaagatactaaaggaggtatagctacccgataaatgtaccgacgtactagtaaagaattaagaccgaatcccctctaaattagaggagtattaagacgtattcgactataaaaaagcgggtatactaccgaggataaaagcttctaactatactatcgagctcgaagaaggtaaaactctaccttatagtccgatttacccccttttataaacggagcttaaagaactataggcttatcttatagataatattaaaaagggatagattagactatcgaaaagtctagcgggagcgctaatcctatttatcccgaagaaagatagaggactatatttatatatagattactagggacttaactatatttcggttaagaatcgctaccctttacctctaatatcggaaatccttaaccgactttcgggagtaaaatactttagtaaggtcgacgttaaagacgcttactaccggattcgactataagaaggtgacgaatagaagatagcctttcgaacctaatatagccacttcgaatatatagttatactattcggactatctaatacgccggccactttctaaagttatatctatatagcgctagtaaggctagttaacgttatttatatagtatatctagataatatcctagtttttactaaggactataagtcctattcgatagcgcttcgctagattttcgaaaggctatagaaggtagagctatatataaagctttcgaagtgtatattctactaaaaggaggtcgaattcctagggtttattatagatagttcgggagtgaaaatagactagagctatatccgcgtgatctaggaatagtaagaactaaagagctactataacgtctaggtttttctaggattttataatttctaccgccgatttattaaaggatattcttagatttctttaccacttatatctataataaaagggagtaataataggaaaaagccgggttaagtaacactaaataagaccgaattagtagcgttttaaaacttaaaaggggctttctagtcggcgtccctattacgctatttcgacctagagaaatatattagattagaaatagatacgtcgaactaaggaataggaggagtgctttcctaacctaataaatgttggggtggtcacgtgcttatcacgtgactccccgctcctaggactttcctcatgtgtatgcagatagcttccccctctctcttcttcttttctcctctccagagtccatttatctatttctctgagttacatattccacctacgtagcttcttccttccatcaggttatgaagccctttgctcgaggactccgagcatcattaaaatcatcaattttcatcaagtctaactgagcgaatcagaattttcaaattttcattatgggtcgcgcttcggcccgtcccgcaccccactaaggatcatcgaatccgtcattaaggtagtgaagatcatcaatatcattatagaccgcatttccttatcagagatttcttatcaagagagctctatattcacaaatagagatttttctatcgtgaaaactctacatttctcagcgagagtcagcgaaaacgcgtctctctatttctaactagagactcttctaatatcgtgaagactctatattctagctagtcaatataactaatttcgaggataacaataccggtgagggcttatcacgctctctccccgcacctcgcacctaaacctaaccttcttcctccgccggcgtagcgaaacgagcgattcggacctagggcataaacctcccggaggagaaggaaatcaaattaaataaaggtatcaagttattgttagatagtagcaatcttactagatagaaacgccagatcgagaacggacttagtatagtccgtatcgataaagtggctaattataaactaccccgaccgtaggagacagaccccgagtacgacatttaggaatactagtcaaaaattgcctatagatagattgagagtctactagattaagagattatcactattcttaaaggaggagtggaagcctttccacgtcgtatagatattataatacgggaagtggagactctcgttcgtagtgtagaaatcatagataatattagacgtaaagttattaagttttataagatccggagattagatttctctagcgctaatacctatatcacagcgtattagacgtagtataactaactaggcctatataaggtagagccgcaccctttcggtgcaatatttattatactttataatctcgaaggagaactagattcggtaaagttcacctactagataataaaggatactattctagagagtgttataaaggacgactttaatagcttatataaaaagctaattatagaagcttatgatacacctactttattaagcacctctactatagcaaatatagcgcggaagatagagaactagcgcggtagaaggggacgcggttatagtagatacggtcgcggcggcggatataatactttgtcggatactaagatagatataaagatagatagagagacgttatctttctttaaaaacggtctagcaaaaggtaagactatcgactagtaggcggaataataaagaaactaataaccgtagtacgttaatagctacaaatatccctactatagtatcgaaggttatctagtaaagatatactaccaccttatagaagaccttattttcgaagggtagaaaccggtaaagaatatctagtgttatagtattataaagcggttagcaaataataagaagaacgaaaataaggctagtgtagcttaggtaaactccgtacgctccgcggataagatatagatactagatagtagtacttctaaaactatcactagtcactataaagatttctataaatacactaagtataaagctagagaaacgctatatagctatactaatactaatagtaatattcaattcgtaatagtatatagtaaggccctagtctagatcaagacttcgactaggaaagtgagaacaatccttatctctacctactataacctattaactaaagacagactactttctacgaatgctctagaagcagattataggatttattataacccgatcacgttaaagcttatacgtgtaaaccgggaggaagtcggcctagtaaagaagattagcggacttctatagattaatagcccgcttttttatagtgtaaagagcgaagccgaagatataaagaaagagaatataaaaacagagattttaataaaggtctaaaagacgcatttttacaagcccaattctagctctaagtctaacgataaagacgaagaccttaatagagttagtaaggtagtctctatatacgaaatatatagacgtctaggacatatcggcaaaccgtatattaaagcttctttagcggatactattcttcttaataaggataactaggttaagctttataactttaattataaagtatattagctcgggaaagcgaagaaacggatcttaagagataaataacgatatattaaaaagcctagcataaaattttatactaacacctagactataaatccccctagacctagtagtaagaaatattaggttcctattatagataactatacctaatacaccgagggcccctattttcgcactaaagataagattgcggaatatataatcaaattctataagcggtagaagcttctccgcggcagatacctagctatccagcgtattaatagaggaagcgaattctataagttctagatatagggggagagtgagggaatgatttttaaacttatacccgcgtatatacctaagcctaatagtatagcggagcgtataggaggctatatcaatcaaatatagaggacgataaatatagatataaagcttctagactctctctagccttttcgtataaataccgctatttatatttataaccgcctaataaaccctaaaataggcaaaaccctaatcattacctagtagcaagaccttagtatagaagaaacgaaggtcaatctaaagcaccttcgtctatagggagcaattgtttttatctatattctaagagagactcgtgtttagttagagaagttaggagcataagcattctagggatatctaattagttacgaaagagaaaatagctatatctttaaggtatagaatcctattataaaagagattatacgctcctaggacgtcactttcctagataaactagataagaacactagatcggataacgactagaaggggggtctagcgccgactagaaagctagtgagattcggaaaagatcgcatggtttgtattgagttagctttgccaacggctaagtactatggaatacggtaacgatagtgtacataagtgcagaaacgggtccatatagatccggctaataaggcataagatatatttacataaggaaatgggcttctaggatcatatcctcccctaccgaataggaaaacggtcctccgtttcccgaaggtcacgtgagagagctcaaaaactccccctagatcccggaaaggtatcgtcaacagacgtacgtacaaaatcgaattcgttaaaggtagtgtaggtgtgtaggggtataaataaaggaaatacgttagtaagtctctaagaatagtagcaataaaggtctttaagcctttataagactcggggtcttcgataggggcctaaaataggtagcgagggtgtaaaattagcttgctagcggttattaaagggaaatctaagaggcgtttagataaaggagggtgcttctaaggtatagactctacctattagtgtccgtgggttgcctaaaggactctcacttccgactttataaataagaggaccctcccacttcgagatagtgtagtatttcctatatagcttcacttctactctcttcccttctttaccaccctactttcacccccttttatccccctttcttatcaattttcatcgattcttatccgtataaacgcttttatatcgaagatacttcgtcgaagtccttataagcgccctagcgagtcctcggggactactaggagtttcactactaccgcgcgggattctattaagcccgtagatactaagcctaggcgtatatcacttatttttcgtaagtactataacgcggagccgggaccctaggatatagagctaactaaggccgcgcgtatcgagcggtaggcgagagagttatacgtaaccctagggaacactaaggtgactaggtccggtaaggtcgatattaataaggtaagcctcgttctcgtgaaccttctagaggaaggacaccgaggcgacgacttctattaagctagttagatagccgcccggaagcaattaggtgttttcgataagtttccccctcctctaagctctcctaaagctctcggaggcataggcggcgatagtgatagtgatagcaatagtggcgtagccggtggtaatagcggtgcggctagtggtgacggtagcgtnnnnnnnnnnnnnnnnnnnnnnnnnnnnnnnnnnnnnnnnnnnnnnnnnnnnnnnnnnnnnnnnnnnnnnnnnnnnnnnnnnnnnnnnnnnnnnnnnnnngacgctagtaagtttttccctactctaaccgtgcctatttagaggctaactacttcgttctaggtaaaggagtggacgctactaggatacctctctttatacttcttataaagagttcgtaggaccaattatagtactatatagaccctaagcgcactagagttaattagcgcgtcactaaggactatacggtatcctcggttataaacgtatatatagccctaggccaaataattggctataaagcccctttaggtgaagcttacgcgtcttataagaaaggtaacggtctgttttccttttaccggatcgttttcctcgccgggttaggtttctagtggtcgttattatatacttactactaatagtctagtgcggctaataaatatacccttcgtgagtaccttttcgggtggttttatcttcgcttcttttctaacgtcttctaggcccgatcggcgatcttactaataatcccgataataactataagactctattctaggtatataacctcgttcgccgcttctagcctaatagtatcctacttaaggccccgaatatactcgtttataccgatagaccttctcgtgcgggtaagaaaaaggctagtaaggagaagggacgagctattagtcctagtaaggctcctattgatcctattgctacacctcccgctaaggataagggtaagggtaaagctatcccggcttccgctagtctagctaaagccggtagtgctattaccactccctctaagtctataaagaaacgtacggctagtgacgcccctagcggtaaggataagggtggttagaagaaaaagcgtactaaggatacgcctaatcctcctaatactatatataccacgccccgctccggtccggctttcgatagtgtgatatacgcgactcccttagactagcctaatatctactatacagaggataagctatagttctataacgtttacgaacgtctctaggaagtgcgtaagcgcgtccggtataattataccgctatataggatctagggcttaagaagggttagctaaaggagggtgatattactaaagcggaaggtgacgggtccgaggatagtagttcggactccggtgatattctgaaccattaaggataaggtagacggatccttatagttagttttcgggccttataccctctttctgcttatattagttctcgttaaggccttatacctctattcgcgcggtttagcgatagtttctattaagtcctaccccttctaggcggctccttcggcgttcttaaggctggtaatacgattctaatttcctaattctagctttatatagacgtaagctcttagatctctctagacgggggtagaataataactacgaaggggtgcgaggttcggcccgagccttatttagactcgcgataagcgtcctctaccgatttatacccgtcggattcgttttatttaaaatccttagattcgtagtcgtttacttccgagtcccactcgttagcacctagcgggccctactctagtgccttattaatagttttcgtctatctcttacgcgcggctactcgcgtctttacgataacacgtttagctataacttcctcccctaggaattctatacgggctcctacgcgcctaaattcctactattcctcccttataaacgtagagaggtccgcgtacgtcggtagagggggttctaccttatcgaggattctatagagttcttccgggcggctaatcttttagccggctcgttatagagccgaccggccggccggcgatacctataggctaggattatcgccgacgtttacgtccgttagtctcacaccgttaataaggttccggagaatatatccgtttagttcggcgagggcgtaagtccctaatagataggcttatataaccttatatagcccgaaccatatactctcgaacttctactttactttattccttactaggacctaatcgtcgattttgaagctagtcttagtgactatagagtcccggatcttttgtttccggatagtatagacgagtaggagctcgtttgccttcgagcgggcgtctataagctactagatttgcttgtcccggttagttccttcctaggcgtccggcggctcacctccgtctacgataatacggggatatatactatagactaggaagtaggggctctttcgagtgatagcgtgctcctatatataggcggcgaatagcgcttttataagatattcgtcctaaagtcttataggcttacctataaggtatttcgtgagtatacgagtaataaggccgttaaaattttctaccttactattagtgcggggatagtagggtgttatcgtatagtaataggctcttagttgacttataaagtgtcgtacggctcccgataaaaggttagcactattatccgagagtaatttattaaatacaccgtagtgtgtatatatatcgcggaataaaaattctataagcgtctccttagttatatctaggaccgtataggcgaccggctagctagttatatagtcgatcgctataataatctatcggttcctattcggcgttattaggagggggccgataaggtcgattccctaacgctcgaacgggcggataccgcttatcactatatattatatagcttcctattcgaggtccttataggaaccctataaaacctagcaatttaggtagttctttatagactcctctatatccgctcggatcgatagccactaaccccggggcctaataatactattaagacccaggaagccgaggtagccgaacttataataggccgtccggagtagctcggagcgaaataggggatctaggtatagagagataacgccgtcttcgtatataaaaacgagttattagttttcctctataggagcccgcgcgaatatattagtgttttataagctaagtcggtcggtatatttcttcactacccttctaatagccgggtcctccggctccgtactatcttataagagctagattatagccgcgagctattcttcttcggggatactatacactatcgttataagcgtaaggtatctaactctaataggcctctcgaggcttatattagctcgggtggttccgactaggtctagccggcggctaatagtatccgctataacattctccgagccctttcggtatcgaatagatagccgatactactagaattcggcgatctaccgcgcgaggcgcttactatactcccttatagtatttaggtattatagggacgtattatcggtaataataatagtctcgaaccggtctccgtcgatatacctatcttatatacggatagcttccttaatagctagtaactctttcttatatatagggtagtttagctcggcgctatatagcttccgcccgtcgtataccactaggtagagttttccgttatcgtcctcctatataaggactataccgagggcctattcggaggcatctatttcgataacgtatagtcggttccggtctagttatttaaggaccggggcggaagcaaagaggtcctttaccttccgaaaggcgctctcgtaggcttctatctagataatagggcggaaacgttatttacgaagtgtactatcactttcttttaggagcttatagagtagcacgtatacctttaaaaagtcgtgaacgaatcgacggtaataagtggctaagccgaggaactaacggacgttatagatagtttttagtcgcggctaggcctatacggcttcgactttagccgggagaggctatatcgttctatttctaacgatataactataaaactctagttcctaggtcgcgaatgtacacttagtcggtgacacgtatagttattacttctataagagcgctaggacttcttctatatatttccggtgctcgttaagcgtagctaagaagataaggatatcgtcgagatataccactatattatagctaaagaggggccgtagcgttttattaataatagattagaaggtagtaggcgcgttatatagtctaaatagtatagcgagctattcgtattttccctagatagtattaaatactattttctcgatagaaccctcccctatacggatctactaatatccggctataagatcgatcttagagaggatccgtgcgttcccgataatatctaataactcctagattcgcgggagggggtatccgttctttactattatattatttagggctcgatagtcgatatatattcgccacttcctattcggtttccgggcgaaaacgaccgggaagccctatacgctattagactcgcggattaagccctttttaataagatcttcgacttatctagcttactcgtcgagcttctcggaggagagtctatacgcgttaatattaataggtatatacgttcctatatcgatttcgtgcgccacgttacgttccgggggaagtgcggtaggtaattccgctcggaagagatccttatatctcgtaaggatccgctaaattccggggtcgtcgctcttaggcggccccggttcttcgttcttatatccgcgataagtcggacggactgtgaaaaggtaggcttcactccctgatttccggaggagtcggcgtatttatttagccgatattatattaaggtatgtgcttccccttgtgataacgcgggcgttatttatagggtgaatagcgtatatacgatagttataatccgtaagggttataacggatatacgctagtcgatatataggttttctacctagaggaaatctcggccgaggattatatcgtactcggtcgggaggatctaggccttaatctgtcctatctagttcccgaccttaactaggaggatagtataaccactcgtttctagccgctcgctatttacgatagtgactagtaccggggtcctaggttttcgtacccggatctgtctatctaacttcccgaggacctatagggagacgaatatatcgcttactccgctatctaggagcatacagatagatattaggtcggcgtctcctatatagatctttccctagtaaaacgttagggagttagtgaggacgtttagggacacggatagatacgggggtctttccctccgcccctaccgagatagcggagggggctccgtttaggcccgtttataggagtttatagggtaataagggtcgagaatattatctatatcgaataatagtagctcgggagcctattataggcggctaacgagggcttctacgttatatagccgcactagttttttataggttagcgggatcgttcgtataccgccttttacttccgttttatctccttagttttcggcttccgatagaaacgggctaggtacccccgtttcctatagttataatattctcgggtctccttaaatagtagtggcccctatgcggtataagcctctatagagctaacgatagtattaatatctatagcgtctaggtatctcgccgaagaccctttatatctctaggcgataacccgcccttactcgtactaggcgaaacggaagataacgtccttaatcgttttaggctagtctcgttccttagcctatttagtatagtaggtagcttttgtgcctataacgaatcgctagatcaatattaggtccggaatatcctaattaaagtcggatataacctactagagattcgcggcgtactcttatacggattagttcccttatttaagcgtttcgtagcgcttatagagtttctctatagataggtgctccgcgaattcctatttaagccattccttaaatatagcctatattaggaagttatccgtaccgagtaagttatattatcgctcgcgctattctagacgctactaggcgacctttacgagcttcctagaggtatatagtatctttacctcgttaggagagtcgtgaccggtaagctttgctagctccgagaagtatcgatcgtagtcgcgcgtctatttacgggcggcgtcgttaagaatagcgctatcgtagttagcaattgcccgtaagtcgtttaggaacctcttataggtgtccttgtctatagcttaaaagattgtggctatagacgatagaggcttttcggaggtgtttagtagcggctattctcccctagaagggaggtctaacctataggataggtttacggctatactaagggccgccgtaagtcgttcggttttagaccgttccgcctagagggcctaagccctattcgtagcccgttcgactaagggattgacctactaggggtctatagtggaatatatatacacgaagatatttcgttcctccacttctagaaggttaagggccgtattaacctctaccgggaggttagctataaattccgcttcggtgtttccttaagagggctacgcggatataattgtttcctagcggggacgatagggggttcttttctttcttagaggaagtaaataataagttctatattcctcttattaggttaggaggccgtctatcttttaacggcgcctagatacggatcttactaggtagcgggacctctattcccgcgcggatcggtatttccctcggatagacgttcacggattcgagatttctctcggagcgacgtgttcgcttaggggctaagattccgtccggccgcgcgggtccttataaatctatatttctccgtagattgcgcgatttttgttaatagacccactccgggtctaggaggggacattatctcccgtgtttttccgttcttccctctcgttctcggaatctagtgtaccgagagagccggaggggagggtagaggaaaggagggagaaaacgaggttttgtgagcctccctacctagtatctaggtccgtagaatcgttgtcgggataggacgagaggggttagcaccgttttcgccctactagacgtatatagtgccgtctcgtgcctccctaggccaaccgtagaaggtggcctataccgacatgctaccagataagattcggaaaagatcgcatggtttatattgagttagctttgccaacggctaagtactatagaatacggtaacgatagtgtatataagtgcagaaacgggtccatatagatccggccaataaggcataagatatgtttacataaggaaatgggcttctgggatcacactagcactaaaagaccctaattcggacaataacgataccggagcactctataaagagggaggaccctagattgaaaagggtaaatagctatttaaaagacctaggattcaactaaaattggttccgtaggttattattactaataggaagccagaacctatcatttaaggtctaataaagctaacaatttagtaaaagcaacccttagtgggaccgaacacaccgggaagagtatagactataccactaacacccaaagtgttaactaggatctaggaagtcgaggatatatctccaattcgatagcctatcttctaaaagctagcaaagagatagccgaaatagcagtctaaatagtaggctacaccgcacgatatatagtaggctatacaacgtcctacactctaaccctaagcacgggaattaatcagaaagtatatagatcagcttagtgtggaagtgttagttcttcctctaccaccacctcagcctagaaagtaagctacaaagcctctagtgctagaagtgatcccggaatccactattcactagtcgatcgagcgtgacaatagtaaggaagcttataagcccatttcacacacactagagagacagacagtttcttagtaagaagagagataggcagtttctcaataggaagagagacagatattttcttactaagaggaagagacaccaattcagcgagatctcacaccgctagcagcagttattaaatcactaacactatatttgccagatacattcagagaggatacactatagcataagactccgagaccagttttataactagtactacaaccagtactacaaccagtactacaaccagttctacacacttaggaagagatttcttataaagctctctctcacagagaggaagagccttcttagtcaatttctcaacaacataaagagatttcttaggaccctttttaataaccagaagaggagttttcacagccgcgagaagagatttcttatgatatttccacgatcgagaccgatcagagtatgattcaataggatcgttagccgtctattatcacaatcagtagcgacgagacaattctatagtttattccccgccgtttaagccgcacaagacgctcactagagcgctatagcttccccgagaaccccctacgtcccccgagaccgaaccctctaccgaaaccgaagacgaagataatatatataagaccggacattccgtagggtaataatagtgctagcgagggatctagatagggataggataagtaggatatatagagaggaaggctagtagtgtcgaaggttcttactaagtaaagcactccttttatttataacggtaaaccgctttatatcaaagacgtcgatatcccttagtcctataagtaagctctaaagtctaaatttgcaaatagatagtaagctactatagagagttagattgataatctctatataaaagacactttcgatattattcgaagaccgctagaaatcactccgcttctaagccaataggtgtataatcttaaagtcactaaagacaataaggtgtatagttttaaagtaagataggtagtatataggaacttctagataaagaaggaagactctattttctacgtacctatcgtctaaagtacacttattaagatcattttcactattattacgtaatagaattataaatagaagcaatttgatatagttatagcatatctaaatatattataagataattaggaaatagtctacatattttaaccccttagtttcgagtactataaaccggatattagaattaaaggctaggtttattaattgaaataggctctatacggacttcgtaatttagtagctttatagaacaaagagctagatactagattgaataagattaatttttacgcactcgacgacgatccttatatatatataaaaggttaaggcgtaatagtatagtttttactagtttatatagatgattttattactaccgcactaatagatacagaagtgtagcagatttaccactagacaaaggagtagttcgaaatcaaagatataggagagcctttacgctttctcggtagcgctatttcttaggactatagtaagaagactattataatatcttagaaagcttacaccctagaagcgttacgtcttatagaaatatagttatacacactaacccctatcccgctatcactaagccggaaataggaggttaacaataataacccggagacccgtttatacgataaagattatatattatatagatctcttattaggagactaaactagctcactatagagataagaccggatattaagtttacggttataaaattatatcaccgctctatagcacctaccactaataatatataaactatccgataggtctatagatacctaaaagggacaatagagctttatataacgctcgggagaatctaggatataactttctttatatatatagacgccttatatagagactagcctaatacgaagtctatagagggggctatctagttcttcggcggtacactaattaggtggtatttaaggaagcagacaattatagcactattatcgatagtagtagagtggtgcgctcttaatagaccggtaagggatacctaatagctaataaaaatcgccaccgtattaaacctaccgaatgtaacaaaacctatcgttatcttaacggataatattaacacctagcttcttataggaaagcgctcttacaaaaatagtataagatggcttaacatacgctagttctttattaaggacgcaatctttagagagaagatcaatctgctacgtgttgacacgatatataatatagcggacgggtttataaaagctctcgataaggaagcatataacagattcgtgtatatgctaggtctttagtgatctacatacaatttactaatagagaaaggagtgtaataatacgtaggaaaggtagtaaagactatatgttaaaaaaaaaaaaaaagagaggtttttgtatagagagtaggaataggggtatctaggtcagtcctaaaggggggtgttagggtggtcacgtgcttatcacgtgactccccgctcccaggactttcctcatatatatgcagatagcttccccctctctcttcttcttttctcctctccagagtccatttatctatttctctgagttgcatattccacctgcgtagcttcttccttctatcaataaagaagggcgttagtatcctatcgctttctagtcctaaaagttcttagggctcgaatttaactatataataccggattaggagctattcgctatcgtttattccttctaatattagagacactatctagatagtagtaagtatcctattaaggtgctattagattatactaatctacgtatatttataacgtagtaaaagcttaatagccgataggcgtattagtatatatttcttacaccttttaactttattataaagtatagacctagaaagacaaaccctatagataggctttctaggattcctaactccgagcgagtaattataggagaggaattaacaatcccgatttaaaaccgaattatagacgattaacccctagacctaagagagactaaggagaaaacggctctaactatctaaaggattttagaagctaaggatctaaatatagattataagtataatttagataaatataacttagaattctagtttagacttagttaagagactatatagggagatcctaggtctagtataactactaagataatagtaaattacgtaagtatagaaatagataactagtctaaatagcgagaattatataacgaattaaatattctattcgatattatagatactataatagtagtaatctagtctattagtatagatattatagatatactcgaataagtaggaaaactctaatcggataacctagagataaaccgccgaaaaggtaatatatcgatctcgaaacctagtagtaaaggctagttagtcgacgctttaggattactatagtaccgaggacgtctatatatactaggaaaggaaggtatctatataaaattaatataattatattataataaccctactataggctactttagtagagtaagaaccgaagaactcctaaagagagaatactactaggtaaatctataggcggatatatagagatatattaaatcctatataatatattaaaccgcctaaacgctaaagtatcgtcctttcggtaagctcgaatctctaccgattctatcctagccctttaccgaattattaatagactttattatagggttaccttaatcgatctagaaaggaaggatagtagatactattctagtgattatagactatttctcgaaatagtgcctcttcttcctagtttcgataacgatagatatttcggaattagccgagcttttctattataatatcgaactaaggtttagcctactaaatagtattatatctaactagggatccgtttttataagtagattttagttaaaactatattatatatcctagataaaattaaggtactcgatagcgttttacccctagaccgatagttaaatagagaggataaattagacactcgaatactatcttcggtgttttattaacgagtaatagaaaatatagcctatactcctatatatagcggaatttatatataataatagagttaatataataattagaattttacccttctaggccttattaggctataatcctaatttctaaatacgcgctaaggatagtagcgtagagagggaggtaccggtagtagtatcgcgaattaagaagctttaagagctctacgaaaagctataggaagtatagcgaaaagccactaagatataggcgaattattataataaacgctattaaaagataatatttaaaaagaacgaccttatagccctctcgataaaaaacctataattaaaagaaggtataataaagaagctattactaagatagataggaccttttaggatctttaaatatatcggaaagtaagcgtatcgcctactactccctagctagtatatagcgatttataacgtatttcctatatctttactataattatagtattaatataaaggtaaatctaagcaattacctttactagagctagtagataacgataaataggaagtcgaggagataaaggataactagcggttcgaagataaactacactatctagtaaaatagtatagctagcccttagaatacaattaataggtacctaagagtgtaatagtgaatatactaaaagttatcgcgagatataaaaggtcctagagaaagtaaaattgatcagaagtagccgattatatactatattagtagcgaaacgatatatatataatcttaaatcgaccctatcttaccctatagctaacggagagatataaaagaaattcactaagtaaaataaaagaaatctaggtctaagacctctccgaaacgataccgataaactaccgctatacctatagatcgagggggaaactctctaagtgtaacttaaggaaaggactaaccgcgggccctagcttagaggagccgactaggtcttatatatcttagcggaaggtaacgacgctagtgtactaagacctagccgactcctccgcgacgcgtagataggggtaataggaaccctctatagtaagcttagcctagttagaagcaaaatctatagaaaggtcgctagagactactaaggaaaagcgagaaaacacctacctagtatatatatctttagttaactatataaattagtaataataaaacgaccctaaattataagcgaaacttacctaggatagcttagtaccggtaagcgaatatatatagcgatacgctttagtaaagctattaaaggacgcgactaaatatcgcacacttactataacgctatcgataaggtcctaagaaaagaggaacttagacgcgccttcctcgctagagctaaaacctccctcggtatttaactaaaattgttcgatctaagataaatatataagtaactccacttagtttctttcgatcccctcggggacctaggtaacgttagtctaaaacggttataaaataggatagtaacgtatataataatataccgttttatagggcttatagagactattataatattaataatttttgctattatatatagtagcgaagtatttcactaagaaaggctagagagctataggatctctttcgcgctaattataaatagagacgcgtaaataagtaaggcactaggttcggacctaaagaatagggttatataacttataaagagaattagggactaaaggtattataataatcttaatacaaaatataaccgaaataataccgttacgaaatagatatagaagtaataagataatagaaaggaagagaaagaaagataaagagcggaggataaataagtctagttacctatataataggataaattatcctaaaaaggaagctataatcgaggatataattaaagtagactcgcttctactatttctattaaacgggtaaaaaacttagagatactactaaatcggtaccttcctactatagaaactactatataatagttaagttaagctctatcgggtaatcctctattagaataggtatatcttaacctatctagaagttaatacggttagtaactatattagtaaaccgccgtttcgccgctatctaacttatatacctagggtctttaggataaaggccgataagacgatatcgtcccctagccgctattagcgcttataaatctatatagatagtatccgcccgatattcggtaataatacgtatataccttatacgcctagccttataaaagattagtaacgaattataaacgaaacggggtagtaactgttggggtggtcacgtgcttatcacgtgactcccgctctccaggacttcctcatgtttgtagatagcttccctctctctcttcttcttttctcctctccagagtccatccatttatttctctgagttgcatattccactgcgtagcttcttccttccatcaggttataaagccctttgctcgaggactccgagcatcatcaaaatcatcaattttcatcaagtttaactgagcgaatcagaattttcaaattttcattgtgggtcgcgcttcggcccgtcccgcaccccaccaaatcggattatcgaatctattatcatcaaggtagtgaaggttatcgatatcatcataggccgcatttctttattagagatttctcatcaagagagctctacattcacaaacagagatttttctatcgtgaaaactctacatttcttagcgagagttagcgaagacgcgtctctctacttctaaccggagatctttctatcgagaagactctacatttttcttagctagttaatataactaattccgaggataataacgccggtaagggcttatcacgctctctccccgcacctcgcacctaaacctaacctccttcctctatagcgaaacgagcgattcggacctagggtataaacctcccggaggagaaggaaatcaaattgaacaaaggtatcaagttattattagatagtagcaatcttgctagatagaaacgctagatcgagaacggacttagtatagtccgtatcgacaaagtggccaattacaaactaccccaaccgtaggagacagatcccgagtacaacatttaggaatactagtcaaaaatcgcctatagatagattgagagtctactagatcaagagattatcactattcttaaaggaggagtggaagcctttctacgttatatagatattataatacacgaagtggagactctcgttcgtagtgcagaaatcatagataatatcagacgtgaagtcattaagttttataagatccggagatcagatttctctagcgctaatacctatattacggcgtatcagacgtagtataactaactaggcctatataaggtagagccgcaccctttcggtgcaatatttattatactttataatctcgaaggagaactagattcggtgaagttcacctactagacaataaaggatactattctagagagcgttataaaggacgactttaatagcttatataaaaagctaattgtagaagctcgtgatatacctactttattaagcgcctccactatagcaaatatagcgcggaagatagagaacccgcgcggtagacaaggacgcggtcgtagcggacgcggccgcggcggcggatataatactttatcggacactaagatagatataaagatagagggagagttattctttaaaaacggtctagtaaaaggtaagactatcgactagtgggtagagcaataaagaaactaataaccgtagtacgtcaatagctacaaatatccccactatagtatcgaaggttatctagcaaagatatactaccaccttatagaagacctcattttcgaaaggtggaaaccggtaaagaatgtctagtgttatagtattgcaaagcggttagcaaacaataagaagaacgaaggtaaggctagtgtagctcgggtaaactccgcacgctctgtagataagatatagatactagatagtggtacttctaaaaccattactagtcactataaagatttttacaaatatactaaatataaagctagagaaacgctatatacctatactaatactaatagtaatattcaattcgcaatagtatatagtaaggccctagtctagatcaagacttcgactaggaaagtgagaacaatccttatctctacctactataacctattaactaaagatagactactttctataaatactttagaagtagattataggatttattataacccgatcacgttaaagcttatacgtataaaccgggaggaagtcggcctagtgaagaaggttagcggacttctatagattaacggcccgcttttttatagtgtaaagagcgaagccgaagatataaagaaagagaatataaaaatagagatttcaactaaggtctaaaagacgcatttttacgagcctaattctagctctaagtctaacgataaagataaagaccttaatagagttagtaaggtagtctctacgtacgaaatatatagacgtctaggatatatcggtaaaccgtatattaaagcttctttagcggatactattcttcttaataaggataactaggttaagctttacgactttgattgtgaagtatattagcttaggaaagcgaagaagcggatctcgagagacaaataacgatatattaaaaagcctagtatgaaattttatactaatacctagactataaatccccccggacccggtagagagaaatattaggttcctattatagataactatacccgatataccgagggcccctattttcgcactaaagataagattgcggaatatataatcaaattttataagcgatagaagcttctccgcggtagatacctagctatctagcgtattaacggaggaagcgaattccacaagttctagatatagggggagagtgagggaatgatttttaaactcacacccgcgtacacacctaagcctaatagtgtagcggagcgtataggaggctatattaaccaaatatagaggacgataaatatagatactaagcttctagactctctctagccttttcgtgtaaataccgctatttatatttataaccgcctagtaaaccctaaaataggcaaaaccctaattattacctagtagcaagatctcggtataggagaaacgaaggtcaatctaaagtaccttcgtctatagggagtaattgtttttatctacattctaagagagacttatatttagtcagagaagttaggagcacgagtattctagggatatctaattagttataaaggagaaaacggctatatctttaaggtatagaatcctattataaaggaaattatacgctcctaggatatcactttcctagacaaactagataagaaaggtctagataacaataagaaggggggtctagcaccggctaaaaagctagcactaaaagaccctaattcggataataacgacaccggagcactttacgaataaggaggaccggtaataacctagattaaaaagggaaaacagctatttaaaagacctaggattcaactaaggctagttccgtaggttattattactaataggaagccagaacctactatttaaggtctaataaagctaataattcagtaaaagcaacccttagtgggaccgaacacactaggaagagtatagactataccactaacacctaaagtgtcaactaggatctaggaagtcgaggatatatctccaattcgatagcctatcttctaaaagctagtaaagagacagccgatataataggctaaatagcggtctaaatagtaggctacaccgcacaatacactataggctatataacgtcctacgctctaaccctaagctcgggaattaatcagaaagcatatagattagcttagtgtagaagtgttagttcttcctctaccactaccttagcctagaaagtaagctacaaagcctctagtactagaagtgatcccggaatcccctattcactagtcgatcgagcgtaacgatagtgaggatacttataagacctttatatataaaccaattaaataggcagtttctctataagaagagagataggtagtctcttagtaggaagagagataggtattttcttaccgagaggaagagacactaatttagcgagatctcacaccgctagtagtagttattaaatcactaacactatatttactaggtgcatttagagaggatataccgtagtaggagactctaaaactagttctacacacttagcaagagatttcttataaagctctctcttatagagaggaagagccttcttagtccactttttatcaataataggaagagatttcttaggagcctttttaataataagaagaggagattttatagctataagaagagatttcttataatatttctacaatcgagaccgattagagcatgatttaataggatcgttagccgtccgttatcacaattagtagcgacgagacaattccgtagtttattccccgccgtttaagccgcacgagacgctcaccggagcgctatagcttccccgagaaccccctacgtcccccgagaccgaatcctctaccgaaaccgaagacgaagataatacgcgtgagaccggacgttccgtagggtaataatagtgctagcgagggatctagatagggataggataagtaggatatatagagaggaaggctagtagtgtcgaaggttcttactaagtaaagcactccctttatttataatagtaagccgctttatattaaagacgtcgatatcccttagtcctataagtaagctctaaagtctaaatttatagacagatagcaagctactatagagagttagattgataatctctatataaaagacactttcgatattattcgaagaccgctaggaatcactccgcttctaagctaataggtgtataatcttaaagtcactaaagacaataaggtatatagttttaaagtaagataggtagtgtacgggaacttctagataaagaaggaagactctattttctacgcacctatcgtctaaaacacacttattaagatcattttcactattattgcgtaacggaattacaaatagaagcaatttaatatagttatagtatatctaaatatatcacgagataatcaggaaatagtctatatatttcaaccccttagtttcgagtactataaaccggatattagaatcaaaggctaggtttatcaattaaaacaggctctatacggacttcgtgatttagcagctttatagaataaagagctagatactagattaaataagattgatttttacgcactcgacgacgatccttatatatatataaaaggttaaggcgtaatagtatagtttttactagtttatatagatgatttcattactaccgcactaacagatacggaagtgtagcagatttaccactagacgaaggagtagttcgaaatcaaagatataggagagccttcacgctttctcggtagcgctatttctcgggactatagtaagaagactattacaatatcttagaaagcttataccctagaagcgctacgtcttatagaaatatagttatacacactaacccctatcccgctatcactaagccggaaataggaggttgacaataataccccggagacccgtttacacgataaagattatatattatatagatctcttattaggagactaaactagctcactataaagataagaccggatatcaagtttacggtcataaaattataacaccgctctatagctcctaccactaataatatataagctatccgataggtctacagatacctaaaagggacaatagagctttatataacgctcggaagaatctaggatacgactttctttacatatatagacgccttatatagagactagcctaatacgaagtctatagagggggctatctagttcttcggcggtgtaccaattaggtggtattcaaggaagtagacaattatagcactatcttcgacagtagcggagtagtacgctcttaacagaccggcaagggatacccaatagctgataaaaatcgccaccgcattgaacctaccgaatatagcaaaacccatcgttatcttaacggataacatcaacacctagcttcttataggaaagcgctcttataaaaatagtataagatagcttgatatacgctagtttttcgttaaggacgcaatcttcagagagaagatcaatctgctacgtgttgatacgatacacaatatagcggacaggttcacaaaagctctcgataaggaagcacataacagatttgtgcacatactaggcctttagtggtctacatagaatttaccaatagagaaaggagtgtaatgatacgcaggaaaggcagtaaagactgcatgtttgaaaaaaaaaaaaaaaaagagaggtttttgtatagagagcaggaataggggtatctaggtcagtcctaaaggggggtgttggggtagtcacgtgcttatcacgtgactcccgctctccaggacttccttatgtttgtagatagcttccctctctctcttcttcttttctcctctccagagtccatccatttatttctctgagttgcatattccactgcgtagcttcttccttccatcagtaactcacctcttagaccttcttcgaccccgagagactataaaaggaataatataccctaagagaactatctaaagcggaggctaaattataactagcctccgagatattgagatatagttcttcgggctagtctataaagtctataaagaaaaagcttacctaatctaaaatatacactagatcccttatatctcgtaatatcctaataggaaactataataaattagtaccgtattatagctaaattataaggtccttactatttcgtaaatagcgtttttactattataatagttatagaggaccgagattctcttattaaacttatagtaagctaggttaaatagtgtatctatatctatcttatatatacttagtatataacggaaataacctaaatagaagaggtaacgaggccgaatgattttataagcgatattagtaagaggagctatagctatagtaccggatcactaccgatataggagagactcggggcgttaggggagatttatatctagcctagataaagaaaacgttccctttaacggcctcgggcttactataggaagagacacctatattagagagggtttacctagacaaagaagagcggtctcctttaatagtctccgtctaaccctaggtagggacacctacgttagaggagggggaataattgtaaaggataaaggtcctttcaatcataaaatagggaatgataggatatgcgtagtatatatcgtaatcaatgcgtgcggggttcgctaggtgatcggccctacttcttagcgcactaggattttcttttaatcctagggccccccgggggccccccctgatttgggacaagagttagtcttgtcatatagaggcaatacactttcattcctatccccgccattcgtatcttacccggttgacaggccttacacctgataactgtatatctttacagtattgtgcggtatagcaataaagaaatctctccgggcagttatcgagctattccttttatatataatctagtagtggggtaaagaggctagagggattagtgtatcgtgctttgaaattgttctattgtcgatccttttctttaaatatgatagtatatataacacggttctacctatagagcatcttcttccacctcttctcggcttttttacggtcttcttaggctttagcgggagtaaggcgtgtacgggggtcctctctaagagcttctcgatagtctcgacgtgcttgcgtaacttgattagcgagaagagggcgtgctttctttaaaatatttatattaatatactaaatataaatcatgttttttatatcgggaaaaacagtctcaattgcagttattaacgctcgctctttattagttaggattgtacgcgggggtggaaggctaagagattcgtaggcttcggtaaggtaggtaagtataatctagtagtaaagtattaattagtattaggatcatatagtattaggattatataggttatacctacctcgtatgaatcatcctttttatctcgtataaaggcaaaacctaggtggaatgtcgatctagtagtagcgaagcccacgatatctagtaaaggaagaccgtaccggttagtcttatacgtgtagtctatagagatcacctaagggttcttctaaagtattataatacttgatttatatatataaaataaagcagacgtataggattgtttatctagcttatatttgaagatctagctactatccttcggaagttctattaataacgcttaaaggggcgtacggccggtaagaaagacctcgtttagcttccgacgagcgttgtaaatatcctagggaactaggatagtattaggattggtcttatatagcttagttaagatctgcttggttgtatagccttgggaaagcgtatgcgctagctcgctcttcttataggtaagatcaagagctcgctagatcggataggttaatgctagtgagggtttatggttataggtcgggttctcgattgttagatgctaaaggcctgtcttaagatatagacgaagagttatcttgaatggatatctaagccttagtgtagtagtcctccggcgtttatatagcttatctagattaagattatcgttatgaagtggatggctatagttataaatgagtgggatagtcttctttacccctttctttgtaaactttgaacggatacttataaccgtatagctatagggcttcgtaaaggtatttactacttccctcgcttccttatatgtactatattaccggtttagcggggggagcgggaatgtaaagcttggcgtagactcggtgactaggcctggctcgggattagtgcttggcactgcgggtagagactcggggacgatctctggctcggaatccgaggatagtaggtattcaatgtattcaaggcctagcgaggctatattgaggatgaaaactgataaaaatagatgaaattagagggatttagacgaaaatgaatgttaaaaatgaggtggaagaaggtaggttaatatatgtaaaccagaattagagtatcaatttgttttgatcctatgtatagagtgctatatgataaaagtgacttaattttgttaggggtttacatataaattgtaggtacctgctatatcactacaattgtatggggactttgacacgaaggcggtgtaaaaattggaaggcggtgtggagcgcggtagacaggtgcagaggtcgaggcaggtgtattaccagattaggaaggcggtactgaaaaatcaggcattttcaggcaggggggggtcaagtaaagatggggggggggggggggtcatattaccaatcccctattgatataccgtgacctgaaatatcgcatttagtatggtgttttggggctaaccggttgatcgtgttaaccggttggccgtggattacgttacttatattatctacccaggtatccatggatgtattgaacttcattagattcagtactcgaggaagcaagtctatcgaaaccgtcccacacagcgtaatctatattccaaaaaaaaaagttctaaaaaaaaagcacagaagttaagatgtgtggatagacacatcctgagctaaagcaatggttcactcgcatgtctggaaagtgaaagggggtggtaacgccaagaagttggtgtttaaatcagccaatcatattagattgcgaatcgaccatctttacccggaaaatatatcatcccccgacctgcggcccgacccaccaagtactgtcggcctgacctgcgtccttgccgcgataacaaactacctcacttagaaacggatttcatccccatactgttgctttcagctccataccgattcgtgacaaatagtgcaaatgctggaccacgactgtgctcatacgccttagcagcgctgcgcgatcatgttaactccctcagggcctttccccgagcggtcgccgtcgccgtcgccaagggtggaagactcatttccgtggtcctcgcgaagtcctcaactgccagcgagaagggtttcgataagccccacgacaagccccagctcggttggtgggtcgctggatagcgcggatcacaggcgaaggactgcggtagcagagtcgggtcagaatggtaggcaagcacatagacacaatacatgaagatatattgacgattatggaagcgatatctacactcctgcagacctcgcttctcccttagaccgcgatccattcgacttcacagaaaccgcccacctcccgagacatacctcctgtcattctctccactgtcccccatgtggaaccatcggcctttaaagactacctcagtgaggttggaagcctatttgatactttccaacgcacgaatccagagtccaaagagatgtttcgtcaagacagctccagtaccaaaggcgacgaagctgcaccgtggggaaggcggaagacgagcgtttcgaagcgcggccagcttgcgcctacaccgctgtcaacaattccttctgtgtatttcgatgaaaactttcgcctcgagaatccgcgcgttttcgatgttgtcagtgagcataccgaggttgtaaggcagccaatgtccaccatcggaggtgataacattgctgcaaatagcgacccgcagcctactaggaagacgcttgctacctataccatcttgcaagagaagctatcgtggtacatggacactgtagagattcatttggtattttcaatttcgcaagcgtcaccctcttttttcgccgcgctcggctcccttcgtgaactccaggccgaggcaaccgactctgtcgcaaagatccagaatctgaggaatgacctcgcgcatttggacaaagagatggttgtgcgcggtttggaaatcatcagattgaagcgaagacgggtcaatctgacaaagctgggtgaggctaccaaacaacttcaatgtgttctcagcggcgcgagccattgcgaggaactcgtaaactctgggcagctggagatggcaatgcaacacgtctcatacgtcgaacagcttgcatccggaacgctggatccgaaaattggcggcgaattgcattggttgctgccgaaccaattcatccggcttactgatctacgtcgactgcacgctctcggaggactgctgcgagacatcgaccagcttcacctgcggattggaaaaggctatgaagcccgattgctggacgtccttctgggcgacctgcgccgacatgtgtccgacgcaccacccagaaacactctggcgcgctggacaaaaagcgcacagggcgcgacagatgcatcttcattgacttgtctgatgatggcagaaaagctgcgcgaagaactcactcctgtcctgcagggccttggccactcgcactatctagctgcagcaagtaccacgtttcgtgaagctcttatccgagaaatgaagtctcttatccgccagcacttgccgagctctactgacgaagaaagtgaatcgtctgcatccacgtgggcaggtggtcgacggccgaccaagcaggaaatgtcgagcgttctgtctcgcaacttgcgtgctctcagtcccgatgacgccgaggcgttcttcgtcaaggtctactgcgggataggcgaagcattacggaggcttagtgtgcaggtcaaggttctcctcgatatcacaagcggcatgaagacttcaaacaacgtacttacttccgtccaaagcccgggaagcaagggcaacccgacttcccgttcgcctagcctttcgatgggatgtaatttgcaggaagagataactcatgcccttgacatgtcgagcctcctcgaacaggcagtggacaaggcacaatcagagatcacaaaggtgctgcgagtcagaaccgagcaaactgttcaccttggattgacagatttcctaagctacttcacgctgaatcgcttgtttgtcaatgaatgcgaggcagtctctggtcactctggcgagacccttaaaggtgtcgtgaacaaccaaatccacacctttatcccgattctgcacgaagtggaaaagcaaaagctggtgcaaaagatagagtctgagaagtgggaacgtatcgacttcaagccgcaggacgcattgacccttgcgcacgtcgtccagtccatgaccactgatccaccggcatggctcagttacacggatctcagtgccgcagtcctggaaacaggcgaactaaagttgcagaaaacccacacccctgcagaaccgacgactgctcctaagcaaaataagaaagaaccggcactagcggtcatcgagggtgagaagttcacgcttgtcgattcggcagtactagcgcttcgcggtatagaacaatacacaatcctcttggcatcggtccccggcatggtcaacgacatctcgacgctcctaatcgactacctcaaactgtacaactctcgcgcacaacagcttattctcggtgcaggcgctaagataacagctgggctgaccaatatcaataccaagcaccttgcccttgcctcgcagtcgctgtccttcttcattgctctaataccctacgtgcgcgaatgtgttcgtcgtcgaccgtccatgacagggtccggcatagcacaatatgaccggttgaaacgcctgttccaagaccaccagtccactatccacgacaagctcgtcgacataatgagttctcgcgcgaccgtttgcatcagagagatgaataagatcaagtgggacgacgaagatgaggtgcggaggaacgtcagcctatatatggagacgctcacgaaagaggcgctcacgctacaacgagtgctgagcaagtacctatccgcattgaacgtgagcatgattgtcggacaggtcttaacgaactataaggagcaatggagcaaagctttcgaaggtgcggcgatacagaccgaggccggaaaagcgaggtgagtatctttctcgagaacatgtcgtttctggctaaccaatgtgtaggcttctgcgagatgcggagcttctcgaatcaaagctcggcaagattgacggcggacaagagctcggcgtgcacataatcaatattgtcaaggcgaagaaggtcgcatcccagccataggcaagcacgagagagggcaggcccgcgcaagagcgaaacgccatatgcctgaaaacgcatatgtatattaaattagattacttaccaccgactttcctctttgcttgatctggcattcatctctcaagtttggcataaagactcgacgcattccgtcctgataggccacgcctccgtgtcagacagcgaacccatatcatgttgactttggattgtatcattctactacctgctgaatactgatttcaacaatcgatggacgaaaccatcgcagagccacgacgtcagcttgaagaggagagacgggcgcgagaagaggcagagcgcctccagggagaggcaggacgacgacttcaaccaaataccctgcttcgccttcttgatcgctgccatgaatctctgtctcaagcgatccgtccgagtcgcgacggatgttaccctcacgactcagggtgacgcgaccgacccagtgaaccgactttaccctaggcgcatagtcccttagcctaacttcccctagctcccaacagcaagtctagagcaaacttgatcgcaccgctacatttacctcgcgcccgctattcccttccgatactcaaatcgattacgtcgccacgaatatctagaacagcccaatctatttagagacgtcgctttggaactttgagcgagatattgtagataacttcgtcgaaaaggttattaatgctttacgagacaatagagctcttcgctataagtttaggatccaaggccgagttactttctacgaacgcgcgaaccaatcggaaactttgtagagaaccatggtgctttgctctacatgtccagaatagatcctaagctgccttagccgaataagtattgatgctgctactgctaattttggtcaaaatttgtcgacttgaaatgttttggccatgaccctggcactagttctaatacatttccgtcttccatcattggaggccggagcaagggccagtttgtaagcaacgggtgtggctgctgggttaaattgagcgtcgtgaacgaccaatgtctcaacaatccatcacttgcagggtaattattgaggcagtcagcacctactcagcagtataacatcatcataggttattcaggctgtttccatggcgcctctgaaaagtatgagaagagtcataagagcgacactaccccgatttcatcgcatgctcctttccccgtcgagaacctccaaacctctccatcacagtaagctcgtcaagataaatttgcttgatttttactgaatttgtctctctaaggtacaatcaactcagatcaacgtggcgacacactcttttcttatacctctgggcgctggctatgggacgaggcagcccagcttcgtaaacggtaccagcccttcaatgtcgaggaactcaaacaaacagcggccagatcagttaatgctgaattctgcgtcaaaatagtcaaattacccgaaggctcatacaacaaagcctttctattgacaatggataatgacgtccaggtcattgcgaaaatccccaatccttacatccctcagaaatccgttaccgccagtgaagttgccacgcttgactttcttcgtaacgagctaggtatacctgtcccgcgagtccttgcttggagcagcaagaaagaccagcctgtgggagtcgaatacatcatcatggaaaaagctgctggcaatgaattgagcaaaagttggcccactatggatatatcggataaggtggacattgtgtctcagttggccaatattcaagccaaaatagccgccgtcgatttcggttgttatggaagcttgttctataaaggagatgttgagggtggcattgatgtccctggaatagctgatcagttttgcatcggtccgagctgtgatatacgattttgggaggaggagaggagattcatgaacgcttttaggggcccttgtaagccaacaccgaatcatacttttggggtccaactaataaccgagcaaacttagggtcgtcgtctggggcatatgcgatagagatcgccaggcgagagaaagaatggatcacccggtttgcaaatcctcgtcatccggcagaccccctgagacagtcagatagccaagagtctcctgattgtcacattaaacttctcgacaagtatctgggagttgtgcctcatttgataccatcacatccaggtcaaaatcggtctgtgctttggcactctgatttacactttgggaatatatttgtaaaggaaaatcagattgtcagcatcattgattggcagggctgctcaggtcttcccgtttttcaggcctgcaggataccgaaattcctgaaaattcatgggcccttgcttttcgaccttccgtcagccacgggcctcacgccaaaagaaaaagaggaaaatttacggagataccagcttacacaacttcagaggctctatatttccaaattctgcgaaattgacaatgacgtcttctctgctctgtcattccctcaagctttaacgcggcagcagctcatccatttttcggggtacacatgggatgacgatggattgtttttgtttcgagagatgatgattcgaacatggcgcgaatggatggaattaactggccagccacagtccgcttgtcctgtgacattcggcgcggatgagcttgcgtctcatgttgccgaagggaagagctgggaagatcgcagggagctcttcgatacccttggggtccccattgacggctgggtacatcttgaagatttcgaggcaaaagtggaaacaatgcgtaatctggtgagttcggtcatcgacgctacggatgacaaggatggcgcaaaagacgcactaagggcttggaaactgtcggagtccggacctgccagcctatcgggtagtctgatggatatctagagggcgtttcctgaagtgcatccctgtaggatatcgatgacaggacggtgtattagggcgctaggccaggaacggcaaaactaacccagaggaaattcacaggtgccaacattacaatgcaaatatcccctataagattgccgagcacctaatacgctcaggctataacgaggaggtggtgtaagtgttgccacttaactaagtcagtgaacagttttctgtcttctcttaggtttaggatcaatggtgctctggagaattagtcggttgatccgaatgcgcataagaacgagaccgctcgcactacttccctcaagggaaatttgctggcgacgatgggcaagatgcaggaagcatttattgcctttaaagtttcttgtcgcttgaggaaggatatcaccaaggaggatcgagatttgaagagcttgaccacgaaggacttcgacgacatcgttgctttttgggcccgctaatgaatcctcctcctactcctccttttctttttcttcttgtttttatacgtgggaacagattcctggcgttctataagcaccaaattgaattggaaccgttccattaatgtattcgaaatgccacatcgagaccgtacttcccgtaatcaaagtgttctagactaggtatactctcagcccagccatcatcaatctctccaagttgccagtcgtctccgaccttgaatcttcccgacctcccagccaggatatccttgtgcatcggttggtactcatacgccacgtctggatgtggaacccaaacgactctcatcccagcgcgtcttccagcctctacaccagcgacgctatcttcgaagaccagacattcactaggtaggatagggctttccccaggctcaatccctgagttcaacgactccaacgcgagcaaataaatatcgggcgctggcttccctcgaccttttttcactcgtgggtcatcacctaggacccttctatccgaccggaagaagctcaacagttgtttcgattctagtcccgaagtcttcaactcataactacgggtcttggtgctagaagccaaagctagctggatcttatccccagacgaagcgttccgtgcacagctcagatttgacagaatcttctccgccccaggtaggggcctgcaatctggaaagagcagtcgcatgccttcgcttgattcgcgggcgaattgctcgcgagagatgggcaacttggcccaattgtggaatatgtcgccgtttgttgagtccgcgacacccattagctgggcttgaatcgacctagtcaaaggaggccttccgtacttttgtaacaattgattcgtggatagactgattatgtcttcggagttgatgagaaggccgtccatgtcgaaaatacaggcacgcactgcggggaagctggtgtttgttagctttgggttttacagaagtcgtatgttggcattcgacaatgctttcgctagatgttgcatttacatagatgtctatgttgggggactcactctgttttagggggagccatgagcaccgagcgaaggcaaactttggtcccgattggtggcagtgggagtgatatgagggatggaggtatgggctggggttggatcaggatcgcaaagcctaactctccttcgcgccaatctctaaagggtttggggcgcagccctggaggggttaaacacctatgtattatttaggtatcttttgtatgccattcccatacaaaaggtatatagtctccgcgatgatacttacattagcatgtggatacggactaatatttaaggatcaggaggtggtaattctaaggctttgataaagtttattgcatggttgatatactctatgataattaaagggcctaaaccaagcggactcttgtatttggtgccctaatgtagaatgaagggcaccagaatagaactatcggcctggatggaccctatcgctgcagcaccgttgtgaaccttttctttgaggaacattgccgttccaggcttgggtagccgggaatgtaagaggtctttggcgccgtaacatatacaagtccaatgcacattggccaccagctctattggatttttattctttcttttttgtttcaattgctgttttgaacataaaacggaatgctgggaatggtttacctttatcaaaattccccgttaggttatgagtggctaacatgaatctgcgtttgattgagatcggcaggtgtatggcatacagtgaagaattcgtcgttcgtaccatttacttattctccatgtgaaactatttttaggcttcgtatcatctaccacatgctggcttgtgacttgagatttcttgtctattcatggtctgagacaagaaatagaatgaccaattccaagctgtgattctaccggccggcaattggaaccagcaatatcgtagtttatcacatcgctatacgcactgacagacgccaataaagcagagtttcgagtggtgaattatgtctcacgtaaaagccaatggaattcgagttgatccagtcgctcgtgttcgccctcgtattcatatgacgtcgggagaacatcgaccgcggtgaagatggaaagtctggggtagtggcgaataacctgagcttgagacatcattatcaaacgctgtcaatggattcgtatcaggtcatctggtccgggagttccaagggttgttcgaaagttgatgctttaggcattcacatgtcttagtgcggtgtatatatagacaccgatggaggtgcttcattccatatctctgagatatttggatcaatcgatcacgatttatcctcacgtaaccaagagctagatatcgatatcacgaagatgcttctctataaggctcttgctcttgtcctcgcccacctcaccctgagccgtaagtatttaaccaacacctacatcaaacccagtcgtattaactacatctccctcccaaacagaagcagcagcttgtccagcaggaggatgtggcagtgctgatgcctgtgtcctcaccgaaacatgcacaacagcaacctttgtctcgccctcgacaacgactatcacaacctgtgtcccaacacccacctgcgcgggggtctactgtaagaaccgggagatcacatctaagcacaacattgaaagtaccgctctctaactaatggtagcatcctgtgaattcggcaacccgaacagccgatgctgctcgggctactgcgctgcgaacaagtgtcgatcgacggatgatgattggccactttgtagcgaggataatggtccctgcgttgtcgatgaacactgctgttatggaaatacctgcgtaaatgggatctgtagccggacttgatacgggatcgttatatatcagaatgcctaggcgagtgtagtcggaattattgataatcaattaatcaatgactttagtttttacactaaaggccagacaatttattttgggctgcaggacatttgccatgaaaacgtaatgtagacatagatttgcctagacaagcatagccacatacgtcctcacatcgccaacacttgctcagccctctcagtaaatgccttcatagcagcccgccacaactccggcccaacactaatcctcgcaacgcccaactcccgaatctccttcacccccagaaagccctctctcaaagtcattttcacgttaaccatgccacctaaggcatcaaccaacttcctcacctccgcactggaaacacccctcccactaggcccaccccaaacaaaaaccgtagtagcaccagcattcaaaaacgccctcccacgctcgatagcctgctcaacagtcccattctccgtcagcaatacatcagtcctagcattaaccacaaaatcaggaacccccgcctccctagccgcctgaacagcaacccctacccgcgccgctgcctcatccaccgaccacagcacaccagtcgcgtccatatcttcgagattacaccccacagcgcctagcgcgatgacctgtctaatggtatctgctagttccgagacatcgccgtgaccatcttgcacatcgacggttaatggtttggtcgggttcgtggcgcgaacggaggcggcgattgcggctatcgcggtgaggttttgggctttcgtcagcgcgttatcgtccacgccgatcgttgcagcgatcgcgtaggacgctgttgcgatggccggtgctgttggtaatgcggcgattatcgaggctgttgcggcgtcgtagacatttgttaggattagggggttgccgggttggtggagggcgcggaagtgtttggcgatgtcgttttgggatggcattttggattatttttggatgattgggatattggatattagagatttggggattttattctagatacatagacggagtacttggtgttatctactttgaacatggggactgtttgagtcattgaatacgaggtactccgtagagaatgaggattttcggaaccgacggttctgcacggatctacgcagatcggaggagcaaggcagacaatggggactatttccccttgtctcagactagacagctggagaataagctgaatggcgcaagggagttcccctctccggatgaattccctccacttgctcaagttgaggagaccatgcaggtcattacgctgctctacagctgcttatggattctccatgtaactcgatctcattcaggtttgccactgtgtgtatatgtattcgattttggatggggatcgacgtgaattgaccggtccaacacccaataactatggggcgaaactgcaaaggaacagaaagagtaaaataataaaaaagaaataccaaaaaaaagaagggtgtaatacaacatacaccccggagcctgatggcttgctctccattgctccattgggatgcataaatggaccttccatgcagctgtgaaaccgaagatccaataagccaaaggaactgcccaggtgcttcaggtggaatttatcctttaccctggagatatcatagggacaatgcacagagacatcctatttgaacttcttttactccatacaatcgaactaccattcctcccaaatggtccaaaacaataaaggctacatatgtaatcaaaataggagcccgatgacatgtggtacgaggaattggccccgttccctagcctatcgaaaggagtaagagtccgtagtaagtccactagtccgatgtagggcgaaacattgaacggtaacacacctgggacctttcgggttggatatccgtgcctgggtgcatatgaacgaggggcaaagctgtggcattcctcatgagtacccgggtgattgtcattgggggagagagggagagagagagactggaatgttgggtttatttcgtttcagatgttctttttataaaccctttataaaacctttattagaccaagacataggacataggacataggacataggtactatgtacttcttgtactcctatccgtacggagttcttccacttcaaatacaatttaatatacatttaatatagatcaaagtcaaacaaaaacccgaccgcacccgcttcggtaaactggacactcgggaagccccgttgctgatggagactctttttttcttttctcctcacggtaatttggtattggtattggtattgtatttgtaatctgagcctagattctgcggttcgaaggttccaatgttgtgtgtacatggggggtgtacggcattacaatatcttaattatctttcggggaagcaaaaaacaagaaaacaaggaaggggaaaaaagaaagaaaaagaaaagtgacttgaagggaagtaactttacaaatagcacttgggataggacaaaggccctgagaccagaatgactttccgatacggggacgatactccaagtccacttcagggacgagagaaagtctatacatatatggggagagatgaataggagacaatagaacaatagatcatttaccattatacatttcgtagaatttctattcaattatctgttcaatattttattataagaaataccagaattataaagaacattggatgtatctatgttctatgtacattataacaatacaatgaaattactataattaattaattaataaaaaaaaggaaaaacccccatcgggaatcccctgtaattttacaaggaatcgccgtcagctctccccactctacggcttcgccttgctctctttctgcttctctttctgctcctcttctctcttctctgtaccatttgcatcttacattctgcattgcttcctctgtatcccttatttctaacgatcttatggcgtatggttttacctcactccctcgtgcagttggccgcctgacctgcagccctcacgctgccatccgaccctgctcacatcctcgaatccctcgctcttcctcccgaccttgacctctcctcaactcccataatgtcgaccggactgaatattcctcagaccgggctgtctctccacctcggagatcagtccggtgatccttccgttaagccaaatcagatcatgcggttgaatttggtgcagagcaccctcgatgatctgattcagagcctacggaaggatcaaccggctcgagtccggctgggaaaacacccttcacttcactatgggggaaagtctcaaacgttccatgcctaccccgaaacccaccgatctgagatctaccatagctcatccgataaagagtcactgtatttcacaggggttttaagccatagtctcgaggttgaaaaggctaaaaatgctaccgccgccaccgatcaggcgctggcagagttggaggagaaattaaatgctcacgagagagggaaggagtcgaagaagactcacctaatctcacatccagatgagctgaaggctctccgaggcagcaagtcaggctacaaaggtcccaccaccaaagtcgaacttgagaaagatcgtttcctcaaaactgctgccaatcgttctctcactgcaagtccgatcttgggtgcccccaagtctccctctctcgcaatgactccaacctctgctccaatgatggagaacaaagaccgtgcgaggctcgaagccctcaaggttcccttcattcaccttctcgccgttcgcgccgtatcggccaagttccttgcccgccaaacccgctccaccatcgaagactgcaccgccctcggcgagaaattcggcgttttgaaccgaatcaaccccgagaaatatgatctcaaggacaaagtctacaaggatcttgatttgtttggcttcaattacacggaggaggaccgaaaggaagccattgagaattctatctctgcctttgatcgcatgcgcatctctcgatccgacaaactttggcaaacacttcttcccaagtctgaacggggcaagggaaagtgcctgtcgcgtttgaaccttcgcactggcccgccccagaaacctgccccactcgccaaatccaacggagaggactcgggcaaggacaatgagaccgaccgcgccacaaagggttccaagactacttcgaccgcgcaaaaggctcgcgacaaggacccgaccaagcgacccaccaaaaccaagaataccaacagcaccctcaccggacgggttacgaagaagactggtgggaaggcaccggtcaaagtggacagcaagatcaagtctgcggaattcgtccacagttcggacgatgatgacgataccgacatgcctgatatcccccctgctgcccccactcctactcccgcgcctgcagccaagccgcaaccgaaggaacacaagcggactccatccaattcgaatcccccagcaccgaaaatcaaggcaccggccaagcctcgcaccactgagacagttcctgctcctgctcccaaggccaaacctgaggcatcgaagcctaagcttgaaccatccaaaccggtcagcaaggtcacgtcttccaagcgtcctccctctcgaccctctacttcaccgcagaagccgtctccactcggctcctcacctcctgccaatgtttccgatgctaccagtagcaaccgcagccgggctgacagccagaaccaatcctctggttcatcctcgtcttcgcctctcatctcccagctagccaaacccgccaaggtgcggcgtgcagcccctgctgctaccaaatctggcaaaagtactccccagcccaacggtattacgaaggccaccccggctaccaccaactcattgaagcgcaaggccgagcccgattcattatccgttccccaggcaggacgtcctagtgcaaacttggaagccaagcggcgtcgagcggtcagctcctctagcggtggcagcaccggcagcgcgtctccaccaatgagctacgagattctgagacagcagctgcgggagaagtctcagaaattcaagaacttttacaccaaataccgcaacttgcatgactcccttgcagcacttcccaacccgccccaggtggaccttgacaagctgcaaaagcagcacattcatctgcaacgcatgaagaaggaaatctgggaggaagatcggcagcttcgcgatggccttcattcttaatttaatctcgttattctcttttatcacatctgcatggtgaccgtgtcgagtgccgaatcaaccaacagcgcggcgtttgcatgtatatcggtcatattatccttaccatagcaattcatatccttatgattcaattttcttggttcgtagagtagcacttgctttcggatagtcaggccaccaatcaacacaaacaaataagtcgagaatcacattgacttctggaatcaatgaaatgaatctcacaagtcaatgaaatatcaataaaaactcagtctcatttcatttcatagtcagtaaacaatggaaccggtttccggtcgatcttcacttttaccccagatcaactaaaacgccatcggacagctgctagtcccaataaggtatggtggccctgtcttgtagggcggtgtaacacgtggcaatgtcacgggattggcgattcaatatacacgtgactgtaacagtagacgtcatttggtcgctcaataaactattccgagttaggcttagcgtcgaggccattcgaacttgctggttcggagcatcatatatagcgatcgatacacccacggccagttatttcttctatgttgcaaagtgccagcagataaacactaaaagggagatactcaagcgccaattttaggctcctttgacaatgactcccccggcccgaggacgggggactaaccagcgcagcccaactgtcttggtgggatcgactatcaaatcaccatgcgaatcaatatgaactgacgcatatcttcaacacaggttacagattcccgagaccagcaacagccccaaacgccccgacgccgccgctcgcccgcaactcgattcatcaccgtcgacaatgtcctccaatatgcctccgacgttccttcaatgcagcagcgcgggccaccagcaacctcacggtcacgccgtcttgcctctgcagctggaggcttaataaccagctcgggcagcagcagttcaagcgcagtggcagggtccggcggaacgatgggccgactcgccgcgcaaccgcggctcccgcctcgaacgacaaaagtcagtgagaagctggttcttcttcctgatacgggagagctggaggagggttcacccgtagaagacgaagaagatgaatccgagggtgcggacctcgtggacgaggagcttgtcgcgcgtctggccaaggagaagaatgtcgacccggaaagaatcagacaccaattgcttgtgtcgaagcgacttgggggtgatttcggcatcgataatgatcttgcccctatgctggccgaggaagaaatcttgaagaaacgtcgtgttgcgcctgagcgcgcgaagagttatgctgagcggttgccgaaggcgcggcggacggagaagcttgcgcgtgttacggcgtactgtacggctcaggcgtataagatgggatctctcgctgcttttgttaaggagcagcatggtgggcggacgaagctttatgatgattgtctttacacggcatatcatcttcctcttttgcctggccatgaggggtatcgtctgcggagtagccctgtgttgaaatatcccggtgggaagtcgctgttggacgaggagattgaacgaaatgaacttcgtgactatcatgatgaatacatgctggagacagaggagcattcagttggtggacacaatcgtccagaggacgagcaccattatgaagcatcgccgcgacagcatgagggccatgatcaccgggaagaaaatcgcgaggaattccttagtcgcatcgctgaggaagttcatggccacctccccaatgaccacgaccatgagcatgctgccagctctggtgaaagtgtcgatgggctgcagcgtatcccaccactcccgcaaccagacagcaatgcaggaactcggcaatcttcgcctgaacctgcactccgtcgccgaaggcacagcacagacgacagccacgctttgattcgagaccgttcccctctaccggcccctgcgccttcgtcttcaacaccgcaagccccggctcggacgttatacaatgttgctgagatgttcgttttcagttacggtgtcgttgtcttctggaacttcaccgagcggcaggagaaagacctgctggcagatctggcctttgcgacgtcgtctgcgactggtatccctattccgctggcaacgatgccccttgacgaggaagactttgagacagaggagttccacttcgagtattcgaccgagatctcgcgtccccgagtctacaacgatatgatcactcttcgcagtggcgaccacatgatcaagctcgctattagccatgctatctcacagagcactaaactgtgtttctttgaggaagtcatggcccggcagatggcggacgctaaggacgtccccagacgtcttgcggttacaggccaattgggaatgaagcgcgaagaggtcttccggatattgggtcggttgtttaagagtcgtgttgaggtcaacctttgtgagttcccaacccaccctacaggccatcttgcatgctatactaccgaggagagacgttgttccatactaacatttcccaccagcatctaatatgctcgatgtccccaacttcttctgggagagcgaaccaaccctttacccactctacatcgccgtgcgcgagtatttggagatcaaaccacgaattcaggttctcaacgagagatgtcgcgtattcctcgatcttgcagagatattgtccgactcgatcgccgacaaccgcacctcccgtatgtttggccttctcgctcccctagcctcccagctaaccccattctagaccaaacctggatcatcattgtcctcatcatcatttcaatcatcgttacaatctccgaggtcttcctccgcttcgcccttctccatgcaagccagggtcccgctggtacacctgctagtatcttggcccgtgtcatgggccgatccgttaccccttctccgtcggagtggtactctgccgccaatgcgccgccaggctgcatctgtccctcactcggccctgcgggtgctggtttggatatgggcggaagcgaatggtgagattctaattcattttattaaaagctggatattatggcgtaatcggtgttaggggaggggtcgctggacaaattactttcaggttgcatatcgcctcgaaaatgacagattcttaatacattgactttctaaaattgattctctacctgccacttcgcatactacgctttggattgagcaaggcgtgtcgtctgtctatgcagcaataggaattttatatggccactatcgcaatatcttccctcatctttccccattcgctttcagaacatttccggacgtgcgagatactcgacactctcaaccatgtcttttcttctaagtcctgacagactggctttactcatctccaactgggcttcgatagccaacacgacagaagcctagtataacctcatcactggtacagcccgggagatgggcttgtcatctctattgactgggtcttcggacagttgctctagttacttcagcaacaggcacagaaaaggatcgcagaataccaaattccttgagttttactgcgtgggtaccagaaggacagccgattatggcttgctgaagtctcaaattcggtattagacgagctctgcggtgtctccaaacttattcacctgcacctagcaagccaagtactaacctattgcatgttaaggaatgggtgcgcgagtgatgtccctggctttggccgaagtcaaggcaacgagaatgcgtcccttctagccaatgtcgagatagggacggtgctcgacgcttccaggtcgctcgccgtttcacgcccgttgggacagatttgggagtggatgagagcacagcatacccaagtttatagagtactttgatactggaataagaaaataagtagaagatgaatccaaaatccccgttaagacggacagagccgaaccatgctaaatatgaaacagagacaccagatatcagtacaaaagggccgggatttcaaagagaaacccagcccggtttctctcgctgcccaacattcgttttatcgtatatccttcaaaatttcctttctagctgattttaaatttaaccggtaaccttgaagatggactcggcgagtctctgaacgttggcggaggtgataccagcgacggagatacggccatccttggtagcgtagacggagtgctagagaagaatgttaggaatcagactggcgaaactgtgcggatgtaaatcttacctccttagcaagggcgtccatctgctcgggcttcaggccagtgtaggcgaacatgccgatctggatatcacgtcagtgatttagaacataccacatacccagagagttgagtttgtgatcttacctggctggtgatgtgggaccagtcgtgcttgctgccgagcttctcgaggttggtgcggaggagagagcgcatctcgatgatgcggctagccatgccctcgacctcagagagccactgcttgttaagagcagggtcgttcatgatggtggaggcgatgcgggcaccgtggatgggagggttagagtagaagggacggatgaggatcttgatctgggaatcgacacgcttcttctcctcggcgttctcgcaaactagggagaaagcaccgacacgctcaccgtacagacccatgttcttggcgaaactctggcaaagagcgatgttgtggccctccttgacgaagtgacgtggagcaaaggcatcctggtcggcattaccgctggcaaagccctggtaggccatgtcgaagaaggcgaagtggcccttctgcttcatgacatcgctgatctggcgccactgggcctgggtagggtcgacaccggtggggttgtgggcgcaagcgtggagcaggatgatactgccctcgggggcggccttgatgtcggcaatcagaccctcgaagtcgaggccgatggtgtccttgttgtagtagcggtactgggcgacctcgagaccggagtcggagaagacagccttgtggttagcccagctggggttggggaggtagatcttcttcgcgccggggtagaactgcttgaggaaagcaccgccaatgcggagggcaccggtaccggagatggtctgggtgatgacgaggcggttgtccttgatggcggaggagtcggcgccgtaggcgagctcggcggcggcggtggtgaaggtgggcacaccggtgatgccagcgtactccttgtccaagcgcgatgcgacgaccttgtcctcagcggcgcggacggagggcaggacgtaaggcttgcccttgtcgtcacctgaaacagcggggatggcgcgtcagcaatccagtatccaatccattgcacaacacggcgattgtttggggcaatgcttacggtaggcacccacgccgaggttgatcttctccttgaaggagtcggccttgaaagcttcggtgatgccgagaatggcgtcctattgaccgagctacgttagaattggcctttcaagctgccattgtggcaattgcaagctcaaagcttacaggaggaccctggggaacgttggaccaggccgaggcgtgtctagctccggtcacgacggtgcgcatgttggcctcgcgggaggcagccgaccggctggcgactctgagagtggaaagcataatggcagagatgaagaaaaattgaaggaacaagacctagatctcctggatttgggattggaaggggaaagggaagaatcggaggtgagaaagaatataaaggatcggagacgtagtcccgatgtttttcgccctgactcatgtgatagcggtaccggatacctgccaattggtatgcaggtccgcctcggtttaggtaccaggtacaactgaccccggcgagatgtacgaatgggattggctgcatgctccgggtaaattgcaggggatctgctgtgtctacagggatttagttgctggatttagctgctgggtttaattgctggatttggttactggatgtggtgaattgttgatattttgtgtatagctttttgttgaattcattctggaatgtagactgagacaacattgaaaacattatatctacatttatgtacccattgatatcaacatatcaacatattaacatcaacatacatcagcccatctccaaatgggatttctcggcaagtcgaatctcccggtgaactgatcgaggctgtcttaactccacaccgtttcccctcacatagttggagaaagggatttctcctatttttccccgtgtcagagctgacactattcttactccccacaggaactcggttaaatacaataatgttaatcccttaaacttgtgtatgtattctaatacagaatattgaaatcggtaccttctcctcacacaagataactacactagttatggatccgttgatcaaggcttaatacacactacgagggttccgacttggggatacaacatacatatgtagacttcggatatcgtaaatttggtatttggctagtgaaatagtgaaaaaaaaagaaaagtatcagcccaagcgaacaccagcctggcgattcttgcgcgcagcagtgcccacagcagtgttcatgccggtgttctggctgctgtccagcgtgctcatagactcgcgcttcttttcttcatcgatcttcttcaaacgcttctcagtcttcatctttccactgcccttaccatggaactggtgactgagctgcttaaaggcttccttctggttcatgttgcgaccgaactcatccacataccgcagttggacgtcgggcttgtattcgcggttgaacacatcggccatatgacgagcttcctgctggtcacgctgcttgttctcccagcgcgcgtattcttcacgttcacgggccgacatgcgctcaagcttgcccgaggcgcggtcccgctcacgctgctgccgcgcgcgtcgctcgatttcggtctcgcggttcagcttgtcggccaagaaacgctggcgatcgcgcatcagtgcgttttggctggtgctgtcggtctctttgaccagaccgcgcgatttcaacatcgatagagtagcagcaagaccttggtccaaagttgattcctcttccaggcctgtgccgctgagttgttgtggctcggccgcagatacttcatcgcgcttgatgcgcgcggcgagctcctcttcgtcttcgatatcgccataacggtccatatcaatctccacaccctcgccttcgggctctgcgctgggactttcaggctccctggccgccgttgtgacgcgtttagcttcctgctcaaggagtgtaggcttgtgtagatttgacacaaactctgaggtttcgtcgataacaaggccaggctcttcgccttcattatcaggcgtttcgatctccattggagtctgagtctcctcttctcgaagctgcttggcaagctcctcggggctgatcttcttgcgcttcttgaaggctgcgcgccgctgcaacgcaagagaggcttgaagatcatcgtcgtccacgaaagaaacatcttcattgatgggcttgcggggagcagggactgggactccgccatttgagtcgatatccatggccgaggatccttgcgcatcggtcgaatccgcaaccggaggggcctcctcgtcatccatgaaagtcctctgttttgtagctttggccttctttttcttaggtttttttattttaacctcgctgatgtccatgtaatcggaggatggcacttcgggctcaaagtcgaggctgataatgttcttccgcaactggttggaaacttcctgtcgctttgcttcgcgttcttcggtcgagccttgggcgtcgagtgtaaatctcttccgttttttgccttcgatctcctcatcatactgtgaaagaataccctggttctccgccgtaggatcatagacgggctttttcttcttgagctccagcttctcttcggttctttccttctcgactaaatcgaggttttggagctcgtcgtcctcttcctcatcgtccaccgccgtgtccttcagcgtcaggatgtgatcttcgccacccccaaaagcacccgcagagtgtccgaccttgataccagccagatccgctgcagtgtactcagtttcggcaaggcgctcccgctctgcgagttcctcggccagtctctgcgcgcgttccttctcgatctttttttggcgttttttggattgagccagccaggccttagtatcaagttggtcgtcattcgcttcgcctagtgtagatccttgaagttgcacattcctttgggcgatatcacgcgcccgcttgatagcagcattcttttcatctcgtttccgtttcgcttcggcggcgtcctggaccttcttccagttttcgtagctctctgcctgtcgtgactcgagggtgcttgctgggtcttcttcctcgccggactcgctgtcgtcgtcttctctgaattctgggccggcaccggggactgggagtggcttgaggccgagagccactcggatcttgttattttgctcgatggatagagcgtccgccattttgacggtgtctggaggaggagggaaagagatggaaaggtattggccttcagcgcgacgccgtctggtttcctgataaccgcaatcgggtcacgtgatttagccacatagaactatacctatccaggcctagtgccataaaatcttagcggccccacttgtgacataaataagagccttccctctttttctttcctcttttcttcttcaccaaacaccggatctgtgtccagatttcctgtccacggactccagtctgactggtttctgtgtgacggttgagagctgggcatttcgacgagcttggagccatcattttcgtggatggcctttacggtttccggtcgacagatctcagaataagtgtctgcgccttgtgatgcgggtcttgagctcccactggtgagctcggcttgacagcttggtgtcggacggcgtcatatttcatatctctttgccgattggccgttggccgctgaggttagggaataaccatgacttgccaacatatcctacaaatagaactcgtatattgtaaacatcttggattgaagaaagtcttcgttttgcgggactacgttgtctaggaaacgtgaaacacgtattttggtatgcgcgcatatgcaatactagcgtgtcgtatgccgcatgtcgaacgcgatggattcagtaatgtttgaatatgttcgtcgaggtcatgatcatcattgcctatctaaacgcaagtaaagcacatgtataaggtgtgtaatttacagcagcttcaagtgtcccgtcacgccgtcaaccacactcttggggcccaagactcccagcacggtcttgctgccacttgcgatttgagtgcgcccagcatcctggataacgcgcgtgcaaagcccaaggctaatagcctgagcctgcatgaccagcaactcctcctcagacttgacctgcaacgcgatcttggcctggccaccgcgctcccatttcttgaggataggcgagttgggcgcgtattcaaggaagtatttgtagcaagcaagggtagcgtgaccgcattgggcggcgattttgcctaagaaaaagagatcgtaagcgcttgcaacacaaaatgcgaataactgaaacgttcgtagagtacatacctttggtcatgcccaggtccatgcgaacgacgagcaccagcttcacctcctcgttgttgtccttgaagctcgacagctcttcgccgttgccctcatcctcggtctcttcatcttcagagtctgattcgtcctcctcatcggaggagtggctgtggaccttcacatcgtagctgtttggccacccttccttctctttgaagaggttgagcgacgagccttggccaatgaaatatccggtcacgcctgcaatgatggctgttgcgatcacgtaggcggccgttgtgggaggcacccggtctaatggtgctggggcggccattttgagttggttggttggtggttgaagatctcagttgcggataaaactttgagggaaactcgaccgccctggatatcttcacgttttgttccactgcgctcaccttgggctcactttctttttcattagcttgataaattccaaatgaaccgcatttttagaggtccaaaatgtctctttgtatgttatttatttgagtattgccgggtgtgtgacctcgttgggcccgttctggctttgctacttgtacctacacttggtcttcaacatgtcaacaaccttccaattcgaacctatttatccgttgccgacatacgctggaaatcgtctgagaatgtcattatcgtatgcttttgtctcggggcttaacaatcattcgctccagtaaaaaaaacttgcctttgattcaggtagaatgttcgcttggtccctctgcggttcgtctattccgtctcaggaactgggataaccccctaaatcggggttatgtacatcgaagcctaatccttgttctcatgatcagccttccagttctcgtttccacccaagtaccggaacacgatccgtgagtccaagtccttgcatcgctcatcctcactggcttccttgtagatctgcaatcccacgctcccaagcacattagtcgatcccacgcgatgggccatgtccaaagccagcgaaatatccttcttcataagatggaccttgaaccccttcttataaccgttcgaggacggcgcatcgggatcaaccccaggcaccgggttgaagcgatcacagatggtgttttgagcattgccggcagcgtaaacctgggccaggactcgcgggtctagtccggacttcattcccatgtccatggcctccgagcaggcaatcgcgatgataccggagaggtagttgttggaaagcttggctgcgattccgagagacggaccaccgcatggaatgagtttgttccccatcagactaaacaattgtctgagctcctcgatgtccttggtgttgtcttcggcacagccgaggaagaacgcaatcattcctcgctccgctccgataacaccgccactgaccggggcgtcgtagaatgaggcgcggggaaagttcttgctaatgtggtctttgatctctaggaagctcgcggtgtcgatggtcgagcagtcgactagaagcttctgtccgacgtcgctggagcagattccatccgttcccatataaactgccttgacgtgctttccttcgggtaacatggtgatgatgatgtcctagtggatattacatcgcgttagtattttctcttcgaaaagcaagaagattaatgtgattcgagatacatactgatctgtcggcaacatccttcggaccagagcatgccacgactctatccggatatttcgcgcagatatcatccactagagccgggatgatatcaaacacgtggacactggaattgactggaagcttctcggccaagttggttgccatcgagaaacccatgtttccaaggccaatgaaaccaatggcctttgcctgcatcatcttgagattcctgcaagtgcaagattggacgacaagaggcaggtagatctcaagccagacggactggactcataagttcgatggaagatgaaaagaatgtaggaataaccaatgtctgagttctttaggggagaagaggaaagagagatacaaagaatcaagaatcaagacgaaagacgaaagacgaaagacgaaagagcgtattccatagacgcctcaatttccacgcacaggcaacagcggttgcagttgaccctgaaattgtcaattgatcctacaattgaattgttcttcgtccaatgttggggtaggttcgacctctttaacctcaacttgttaattcccccacaagaggcaacaagaatcgtctcaaatgaaacgacctaacttcggactacgtcttgctctttttttttttttttttttttttttttttttttttttttgtcagcaattgacgcccaagttgtcatttacgtctactaataccaaactccatgtccaagttcacgctcttcaggccggtcgccttgcgctgtgtcctggtggatatccttcaagacagcagtatcttgatagttgatgcaccagtcaatctccctgaatatatcaatttcctcgctcgcgcggccaggtcagcatacttactacctaggggtgcgtgccataatcgacgtgttatgagcaaagagggggagattggacactggcagataaatgtggccacaatggttgcacattggttgcattgatacaaacaaggatcaagctgaagaatcgattgagtcgattttgcagcttcagtctgaaggtgttgaggttatattagctcaggatgtcttgggaaagaagtcacagaatcaagctcgcgtttcggggccagctccactgagagagcgatctctaagaggaagtatcggaactatctcgagcttatgacatgttatagttgaattggatgcaatatgcaagcgcgtctggagatctatccacatctatgaaattgcttttatcccctggttcaacgaactctctatcctcttttattgagtgttatgatgtacaatacatctgcatcatcctcggattaacccaggaccgtatttcattccttcgcccaattcagagaatatacctcaatctgtgaagccatactgcatgcgaagacattaccacacactggcactgacgctatggaaatcgccaagaggatagacattaaacgagattggggaactggaaggagaacgggacttgggagcgaagctcaagcatggaaaacacttcatgacggaatatgcggacggtagcttccaatctcagaatgcattaatttaagcaatctttccttgttgttttcatgccgtgtgaactccaactcaagcgtaccgtgcaacagttgtcttccctttcttgcaatttcgacgccaaggaaacaacacattgagctggggtagctaggcagcttatcgacgatagatgtgtgtagttttccacatcttgcacgtatgccttctgtgacatcgtgatagtcttcttggcgcaatcccgatccagagcgcagttcagatactgctttggttctccgagatccttcatatcgtaaaactgacgaagctcatcaacaacctgctggatatcttcgtcgtgcggagcagcaatgataaaatcatcaacgtgtatcatcataaacatgtagtggtagttagtaaccagggattaatagatgtaagtggtcatactgagaaagccagaaccatgactaggttgggtttgatgggcttgcgagcttgttatagccggtttatatctaggtactacttcctagtggtccttgtcaaagacaatgatgttaaatcaagttgttaaaccaatcaatactagtagaggacgaggatacccaaggccttcgccgggatgctgagattggagtcgtcgccgagcttggggtagtctctgtcacttagtgcctttgtaaggacggttggtatgtttgacatttggttggcgagagaaggcaaatggaaactatatatgaggaatcacgacactctcaaatggctaagcgtccagccctttatataagtagtattagtcgtgtagtattggttgaacaggccaagaaaacgataaagtcgtagaacaagcgagctgcaagaaaagaacaaactgtgagtgtgagtcgggggtacgtaagttggtgcaatcgacttctctcatgccatttggtattcaagtcatgcaaagtgtcacagtgttcgcatacaaactgttctattgacgtgcagcatggctagatctaacctctagagatgagtgccagaacccagccatggtgtcccaagccgattctgctatgcggacaattctggggtagacccacggtgctgacggcagttaaaaagcgttagaataatcacctttgcaccttggatatcaattttgacaaatggagcagttcaatgctttcattttgaacatgggggataatatggggagcatccacatggtcttccccgggtgactctgaatcgggcgatgactataacctcgagtacgctggttcagggtgaggcagcaggcgcgttatgaagatagcagcatagattgggtagcaaaggggccacagccttgggatcttggaaaggtatacaaatcaattatattctgggcacagaggcaaggttgacctctggatgttatgagttactaatgcattcggtgaatctgttacaaaaacccgctagatttctgggatacattgattaaaaaagtagctggaaaaaagccaagattgaagaggccccatccccaacagatgtctgcccaacaagaacacaaaccaacccaagtagtatattggacgcgtcacaataactaccactgattatatacaacccaaaacaccaacatggaccaaaagaggctgtttagtttgcgctaccagcgggggcggcagcacgaggggcgtttccagtgggacccacgcgacggctcctaattccggcgttagactgataacaaacaacaagcataaatcaattccaacttacatcatggtacggctgaagaaactgataccgatcatgaacagccaactggggacagcaccaagaccccagatgacgtatcccatggggatgttgagctggtacttggcaacccagccgtcaacggggtggagagcgccctcataggcggggaccttctcgtagcccttcttggcgtggatctcgtagattttctcgggggtgacggtggtggagttcaggtagatgttgtggagaggagtaggggcacgctcctcgccaacagacggctccttggggacctggtagtactggacagagggagcgctggcggaccaggcggcgcatagaacctgattggcctcacagtccaagtatccgaggttaggtgaggtggggtcggcggagaacaacagaacggattcctggtaattgcgaacatgttagggtcttcatacttggtaaaaagacgcgtccaggaccaagcatcaacccaccttgaaggccttatcggcagttccgcagcgaccgaagcaggtcttgttaccaccagtggtgtagatcaaccagtcctccgcctggggtcctggggtaaggatggacttccagttgtccatggacacgttggtgacgctcttctcggtaaccttctcggccagcttctccatcggggcagcaacgggggcagctgtcggcacgtaggacttgacctggttgaaccatccctgcacgcggtcggcgaggggaatctgctcctgggccatggccagagcagggaggacggtgacgagcgaagtgaaacgcatcttgagggctgaggcgcggaacaagttagtgagacaggtttcgggaatgatgaatcaagtctaatacgatggaacttaatcgaggcacttaccaatgaccgaaaggcggataagaattggcacagtcagagacaagaggaagaatggtgtccagaaggagttgggaagacagctggcctgagcgcgggccaaccacaacactttaatttactcccacaacatctccctctttgcaccgatggcagcactccctatgctacttagttcaggaaatgtcccagattagttccagatgcatatcataatgtctttttatctatattgcaatcgactagatttttttgagtgcaaatcatcctggtccatgtggattctgacttgcatgaaagctcccgaccccacaactttaggtgccgttatgtcaacaattggtatcatgtacactgaaggccgagttttgctgccattgcatgtcttgaagactagatattacttatggccagaatgcgctggtgctggccgttatatactttccaaccttgttgaatagtacatatgtccacgggtatggatagaagatctaactaatgcatgtatcggattcgatgggatactttctatgaaattgatatggaaaagcgtctcatctcttcattcctagaatatgaatccatcgttatgggcccattccctacctatatatataacccatctttctctatgaataatttagaattagaatgatagcgatttcgtcggcgggagatgattggatgcgttcggaatgaaatatatgtacaatatagatcggaagtgatgcccaactgaacggcagcgctgatcttgcatctgtacatatgtattgagattcttgtcgagactgaagaacgatttagggttatcgttgaaccagttctgaatagattatgtagagctacaacgtcaatacaggccctgcaggaccggtggtgatatcgaatggttgaagagaaataaacatcactatcacacttggcgatcttcattgatctacacaaaattggaagacacacaattgcatttggaattttagtacccggaattgctctcgtactagtgattcaatatggttattgaggattttgggatacaatggtaaaatgcaagtgtgtaaactgtactacccatcctggggcctgcacctgggcatgagttgaattcatttgaaacataagacactaacattcaagtgcttccagaagttggagtagttaggataagtaatggtgcatcactacctgtccactgatagacaagtattttataaacgcatatctacctataggacctcgggagtcttggacctgctccacgcaatgcttagtgagcgtgtcctttgcacctgagtggcaagcttaataataggaaaaggctggcccctgagtaataataacctgttatatactattaatacgtgtaaaatttgaatgatccttgtaatgcacccgtttcatagcatgtcaacttgtgtgtcgacattataatttgagatctacgcagatcatatcccagcgcttgaggcctcgagccaactagaagaccggaaatgatgatgacatcacttttccgtttgcataggactttgtggatagtaagaatagaatgttttgagtctctcattttgaaaacaaagaatagtatagctgttatataacaactgcatatatcagtagaaaaacatcattatcagttggaagttgaggtggacttatgagtcagaaccccacaagtgcccaggtgaggtccgatgtcggttcttagccattgaagtaaattgcataacacatgctgtttcaatcagaaatttcaaattttggggaagaaagcaattggaaatggacaaattgagtaggaaataatagacataccaaaattttacctcgtatattagtagaaatccggcaggagatttgatcctatctccaaaatatacttcccccacctctccacaatcaaaaatttcttttttgccgtccaaagggaggggcccatttactcggattcaccgcccactacttcactgtgaatttatgactcttctcttttcatttcttacaaagatcttaaataccttgattttccttttcgatcttgacctcggattatccttaacttttgcacttcgtcctcctcatctcgactctacacactcaaaccctcccccaccatctgcaccatgtgtaccggtgccgactccgagcccaatggtgctcctgccaccgtcgctgccagtatgtcaattgaaagtcactgcgccagaatttccctctaacttttatttagacggcgaccactctggtttcgttggcattgaaactcgccagaacccccacccctccgcatcccgcaacccctacggccacgacgctggcgtcaccgatttccttagcaatgtctcacgcttccagattattgagtctactttgcgtgagggagagcagttcgccaacgctttcttcgataccgccaagaagatcgagattgccaaggctctcgatgacttcggtgtggactacgtgagtcatcggccaaacgaatagttcatatccataaacagacattaacgatagtaatcacttagatcgagctcactagtccctgtgcttctgagcagtcacgtgcggattgcgaggccatttgcaagctcggcctgaaggctaaggtacgttagggttttgatcgggtctcgtgactattggtatctaataacctgtttagattctcactcacattcgctgccatatggatgatgcccgtattgctgtcgagaccggtgttgatggagtgtgagttgtgcatcttgtccttgattttgttgactcagaactgactttgtctagcgatgttgttatcggtacttcttcttacctccgtgagcactctcacggcaaggacatgacctacatcaagaacgccgccattgaagttattgagttcgtcaagtctaagggcattgagatccgtttctccagcgaggactctttccgttccgacctggttgaccttctgtccatctactccgctgtggacaaggttggtgtgaaccgtgtcggtattgccgacaccgttggctgtgcttccccccgtcaggtctacgagctcgtccgtgtcctgcgcggtgttgttggctgtgacatcgagactcacttccacaacgacactggctgtgccattgccaacgccttctgtgccctcgaggccggtgccactcacatcgatacctccgttctcggtatcggtgagcgtaacggtatcacccctctcggtggtctgatggcccgcatgatggtcgccgaccgcgagtacgtcaagagcaagtacaagctcgagaagctcaaggagattgaggacctcgtcgccgaggccgttgaggtcaacattcctttcaacaactacatcaccggattctgcgccttcacccacaaggctggtatccacgccaaggctatcctcaacaaccccagcacttacgagattatcaaccccgccgacttcggcatgtcccgttacgtccacttcgcctcccgtttgaccggctggaacgccatcaagtcgcgtgctcagcagctcaagcttgagatgactgacactcaatacaaggagtgcactgccaagatcaaggccatggctgatattcgtcccattgccgtcgatgatgctgacagcattatccgtgcctaccaccgtaacctgaagtccggcgagaacaagcccctccttgacctgactgctgaggagcaggccgcatttgccgccaaggagaaggaactccttgaggcccaggctgccggtcttcccgtataggcgatttcctttcaccaatacatatattgtgtcatgctatctcacagtggcttgtgcaaagacgtggcagatacctgatgatttgatgctttttcatttgttttgacattttttttccatataaggggttgaaaagtcttctttttttttttttttaccatcttggtcttttgggagagcaaagacatttgtgctaggagacaagagttctccttaatttgtacatttagcgcagaaggggcaatgacttattctgaagactgttgtgcttctatatagtagttgtagatgtacctaggtagtctggagcaattacgtcagtggagaaagaccagaacatcgtctacgaagagtccatctagtaactcgtaaggaattattatcatatgggatggatactatttcaagtctatgaatacataaatacataaattttatacatatattatgtatggatctccagacctcttgtcctgtcattatatgcaaaacgttgagcgcctgcttcatgtgggagccgaggcccgctaagactcaaccagtcagaacgtactaacgtactacttgacgaaatgaaacctccccatcgccactcccgcccatcattattgcaggaatatttctaggggaacaatgagctcttcaatgctgccagttgccctgcagaataagctggtcggctacggccgggtgtccagcgcccacctttctgcctcgaactttgacctgtaagttgagtaattcccccgttccccgcggaatcgggcccagaacaaaaggcaaaaggcgatcaccactgacacctttcctcaacacagtatccgcaatatcgtatttatcctattcatccttcggtatacgcgcaagaccttctactccatccgtggctacggcatcttcggcagcatccgcaacatctatatctccctccgcctgttctgctacagtatcttccttcgcgtccctggtgtccgcggccaggttgataagcaagtgagcactgcgatcacgaatctcgagtcgaagctggttaactctgggccggatgttacacggtatcttacactgcccaaggagggctggtcgccggagcaggtccgcgctgaacttgacaaattggctggacttgaacatacccgctgggaagatggtcgcgttagcggcgccgtttaccatggaggtgcggagctgttgaagctacaggctgaggcctttgggcagtttggtgtcgcgaacccgattcatccggacgttttccctggtgttcggaagatggaggctgaggtggttgctatggtatgcatattattcctatgtctagagtacggtatttgaaggagcattctagctgatgtctgatctaggttctcgctctgttcaatgccccctcggatggtgccggtgtaaccaccagcggtggcaccgagtctattcttatggcttgcttggctgcccggcaaaaggctttcctggagcgcggtgttactgagcccgagatgtaagttgacgtaggaatactatatggtattgactagtaggactgatcagtcatcgcaggattattcccgatacggcacacgcggcatttatcaaagcctgcaactactttaagatcaagctgcaccgagtgccttgcccggagcccgagttcaaggttgacgtgcacgctgttcgccgtttaatcaatcccaataccgtccttcttgtcggatcagcacctaacttcccccacggcattgttgacgatatccctggtctatcgcatcttgccaccaagtacaagatccctctccacgttgactgctgcttgggatctttcgtcattgcccacctcaagaaggccggcttcccctcgccctacgaggaagagggtggctttgacttccgccaacccggtgtgaccagcatcagtgtcgacacccacaaatacgggttcgcgccgaagggtaactcggtcttgatctaccgcaacaaatcataccgaaacaaccagtatttcatctaccccgattggtccggtggagtgtatgcctctccttccgtggcgggctcccgccccggcgctctgatcgccggttgttgggccagtctcatgagcgtcggcgaggctggatacgtcaacagctgcaccgatataattaacgcggcgcggaagttcgagacagccgttcggactgacacgaccatctcactgcacatggaggtcatcggtaaccccattgttagtgtggtcgccttccgcagcaagaacggtgccattgacatttatgatatcgccgatgacctgtctgctaaaggctggcacctgaacgccctgcaatcgccggcggccatccactgtgccttcactatccccactgctaaggctgtcgaccagctcattgctgatctgagtgaagtcatcggcaaagagcttgaaaaggctgagcagcgcaagcgtgaaggcaaatcctacatcctcaagcgtggtgatacctctgctctgtacggtgtggctggcagcattcccgataagagtgtcgtcagccgtctggcagaaggcttcctggacactttgtacaaagcatgagtcttggcatgaagatgtcggtttcttgtttgtatcttattttttcagcctgtccggactgctcccaagacatagtcctggtgcgttctagctgtccttacccaaactgctggtgcagtggcgttatcattatccaagttctttcgaattgcacataattgtttcaagtgttggattccactagacggtaataatgcatataatacaatagtttgccagaaagacattcgcccgatagatgtggacgtagagtacatgaccaaaagagaaaacaaagcaacccgctccatgcaagcaaagccaaaacagaaagaagaggacgcgatcgaccaatcgatcaatcatccgtccgagtagaaggcatttcaaaagacccaaacctcatctcagtcttcgagaccggtgaaaaggaaacccagtctgaaaagcatgtcattccacgcgaagttcaatgaaaacaatcactgaccaccgagctccccccgctgctcagcgcagctcttttcgatatagtatccaggatcaggcttgcgctcgagatgcacctcctgtttcgtgaggcggtactggcactcctcaacgtgaacaagttccttgactttcatgatttgacccgcgacggagggcgagacgctgtggaagactgttgccatacgcttcttcaagccaagcgccttgagaacgtctgttgagcggcgcgggagtccaattgcggagcgaatgagggtgatgcggaagtaggacatgttggatttgtggagatcgagaggatctgatattcggatgttgttctttggatggtatggtttggaggttgtccggagtcgcggaatcggactcggaataggtgggctggagcgcggtggacgcagggatatccgaatatcggtaaatgaggatccgcagccgatatctgcagcgtaattgatactgtgatctggcggagaaacgtcgcagacttggagattatcgcgaacccgcaaattcaattagaaggcggtaggtcacgtgtgtattctgccccgatccgatgacagcagcgacgacaatctatcggcctgtgatagttgatatagtatttcgcatttcaaaagcggagactatgggctgcgctcttctcagtgtgacagtacctggattcatttcttagttcgctgctgttacttcccgcaagcaacgccccatgcccgcattgttgacaactcacccctcgacctagcttcgagcgattgagccggaacaacgacaccacgagatccctgattaccttaccatgaccatggcacaagccagtaacattgagactacggtcgcgctgccgcgacttgaagacctcctgcggcacccggaggatctagacaagatcagcgggcttaaagcggaatacctgcggaagaaggcggcagttgattcacgattgcgtgaaggtctgcgagaccagctggaggccgtgcaacgcagcattggtgctctaactgagggccagcgacaagtctcgaaaacgaaagacgagcttcaagggatcgacaagctgtgcgccgagtcgcaggatagcgtggaggactttgcgcagattgaccaactcgcgcggatccaacgacatttcgacgctacgcttatgatgaaacggggactggagaatttcgacgcggatatccaggaagtcgaggatttgctcaaagacgatgatgacgatatggagaaccagcctaatattctgcgtgctcatatgcagatctcgcggttaagggatttccgcgatgaggctatggatcagattcgaaaggcgaaggatccgagctctgaagagactctgggagagtactttaacaggttggattccgttattgagtggtttgatgaccaccttggcacggcttgcatgaacctcatccccttggtgcaggcagataacaagagcatggttgtgcgtcttgctgttgttgtattgaacgaggagaaaaatgacgataccgtccgagccttgcaagaggctcagaaagaccacaaggacctcgcaagtcgtttcaagtccatgaacattggtcccaagactgtgcggggttacaaagacaaattcatccaagctatcgagctttacgcccaggggcaattcgaagagaccctcgaacaattccttgcagatccggaaaacctggaaaagaaattccgatggtacttcaatgatctattcacggtcaagcaaggcatgcagagccttgtcccgaaaaaatggaagatattcaaaacatataccgatatctatcatcagatgatgcatgacttcctgctcagcttgatcgacgataccgagcttccagccgataacctgctcagtatcatccactggagcgacaagtactataagaaaatgaagaagctgggctgggcatcaacagaactccaacccaacattctcgacgaccgcgagccagaactagtccgaaagtggcaggccgtcatcatcaacgccgtcgaagaatggatggaccgaattttcaacgcggacaaaaagtccctcgtggaacgtgccgcagatgccctggacaacaatgcagaaggccacttccgcaccaagacactggctgacatgtggcgcatgctccacgaacaagtcatggcatcaggggcatcagaccgtgcagacctggtagagggcgtcatcgacgctatgttccgtgccttgaagaaccggcagactgcatggcaggcacttgtggacgaagaatgcgcaaagcaccaagtagaaggcgcggaccaagaaggcgtacagctgttacaagactggctgatcggcatagccaacgaccagatctcctgcatcgacgacaacgaggagggcaaccagttcggctacctgacgcggttcaagtccgatttcgagcctatggtcacaccaaagtacatgggcaccacggcaaccatcgagctggattccctgcgcgatggctacgtggatctgagcacgcactgcctggcgcagttcgtgagccttgtcttctgggtcgatctggacactgtgctaccagacttctacacgtcccgctggtacggcgaattcgccatgaagcgtattacctccacctttgaagactacatggcagactactcctccgtgctgcacccatccctggccgagatcctggtcgaggaactatcggacgagctgctggtccggtacctgtctgcagtgcgcaacaagggtgttaaattccgccgtaacgtggaccccttcacagacaagttcaaggacgacgtccttactgtctttgctttcttcgagaattaccccgactcattccagggtactatcaagcagaagtggcgactggttgattggcttgttcgtctccttgccactgaaaagggccccgcgcttgtggaggtttacgaagcattcaagcttgagtactgggatctgcagctttcgtgggttgaggctgtgctgcgcacccgtgatgatttcgagcgcagcatacttaccgccatcaaggctaaggctgcggagttatctgttgaacggggacaggagaccatcatgagtcggttgagatgatccagtggtacttgattgggggacattctttcaaccacacctaagatgccatttcatctcagctcctcagcagttcaccggcctcatttcatcccattgtcacgggacccgggctggggtaatcgccctctggctttcaatgtcccgtcagaatatcgcagatatgccctaagaagaggtcatagagcctctcttcgctgcgctgccgacgcagggctacacttcgacacaactcacctcacgatgagcaatccccagcatacgtaccatccacaacccaagcaggcttgggatctagtctactcattaatatcactagcaatacagaaatggaagcaaatatcctaaacaatctagtattctcataaatatgtccaaaaaatgatcctatttacgtgtattattgccaattgatcatttaccgtcaaatgctgttcaacaagggccgagagtcaagtcatggatttagactccgttctgcaacgaccgtatattccccgccaaggcgttcattcaaaccatgatcgtcgttgacacctggatataattctttggcgcccatctcgcagatgcagatagtatccagagggatttccttcgcccaaacgaaagggtagccccgcggaagagaagcggccgaatggcttctgtgctcggaggaaagaatgtcggcgtcagggattggtgacgatcccgtatggcggtggtcactttcggtgtcctcggaagatccagcatgtgctgggtgtgggatagttcgattgtcatcagagtagtaattacgatattgtgagatgaggttgcgggcgtcgaatgttaggcgtttgggaggatatttgccatttgcatctttgttctggccccgtcgtccgttgacgtaaattgtgttgacaagagtagcatgcaggagcagtggtcgcggttttggttctcgagttattacaggtatggatgggtccgggattttcgacacgtctggggactcagagggattttggctttcttgttggtttaaagatgcatcactagaaacggtagtagatccggaggcctgaaggctgtcttggacaaagcggggattcttttgtcttcctgctggccttctctcgagctcattctggataaagccagcctcaataaatttgtcacgtagctttacgcaaaatggaagtaagcggcctgtaggatcgaccggagaagcatgtagtatggttgctgatttgtcttggggtagggcatgtaatgactcgagagacacagtcaagggcgacgacagggtgctgttctgttgtgtgtgagcggtgattggctccgcctcgttcatcacgtccgccagatcaagggattggaaaaaagcaagagcttgatcgagacgttctttgctggtgagactcattactccaagcgtaaggtgaattgtgcccagtggacgaaaggctgcgctgggaagacccaggcggaagttgtccccctccttggaggacgattgagtagctggcccgggttccgcgagatgggttgttttgaaggctgcgagcgattcatccagctgcggcagagatttggtgtttaccagagggagacagaggaaatgtgtcaattgcggccgcttttgccgcttttccgggcgtggtttgcggttctgctgccttgatacgtttacggtctccgtcatgatgcacctgtatccccatgaacgtaaaagcagcatggaagtaaatcaattttcgcgcgatccggtcgccgaaatcgtctagagagttgctgttaggaagaagtcagaagtcagaagtcagatgtcagatgtcagaagtaagctttccaaggtcgagagacgcacggaccatggtccacaaccttgtgtcaacgtgagaatttatatctctcttggccttcaacaccgaagagattattcaatgcttccagcatgatatgcatgttgacggtgcctcttagtgcacctgatcagttgctggggtctttctggggctggtcctaggttgatggtcgagggcgaaaggtgagggcgatatgtgatggaagttgcagtctaatcacctgggcacacagtgatatgattcataatctctgctagcgggaatgtgatgctgatgacggcaacatctaaagattcgattgtcagtatgggaggacgagagccaaataggaaagcccaaggtggtataaacccacgttggtcgatgacgccgatccacgtaaaagagaaatagacgcatttccctcacttctcattccacccaacatggctcaatatattctcaagataaaatccatattccatcggcatccgaacaagaaaccagacaattttcgaaagattccaccagagatagtggatatactctttacattccttcaattcgccgaccaagtttgcctcgcgctaacctgcacatatctgttcgcttgctacaagttattccttcatgtgcgtaaaacgggagttcctgagcttctataccgcgaaacagttgtggaattgtgcttagttcatcaacttcagcatggctgttgggggcaattctgctggcgttacaaaccccacccatcttgcggacgcgcatttctatggatatgtggatacaggggaaagcgctgttctgtttgtgacctagtcggctaaatgtatccttcatgcctaatggaaaaccctgcccgactacatcccatctaattatcgcggtgttctttgctccgcgataccatgctgtcttgcccagaacgtccatgggtgggaataagcgtatccaagtgtctctggcaaatggctgcaattagcatcgatctgatgttgtttgagcagaggggagaatggaaatcgggcatgtgaacagagaatccactgccttattgcagttgatcgaataggaggcagtcaacatcttccgaaggtggaattctcaaccgaaggggttctatgttgcttcttgattgtggaagcgagaaatccttagcaaaatagaagctaatttagctattctctcttgattcttccccaactttatcccgaaaagcaattattaggcgtagctctacctgtataggctcaattctttgaaggtcaatgtgttgtatgatgttcagttttgattcttcacattgactgctgatacaattccgcttctgtaatttgactgtggccaccagtccatccatcatcatcccagtccatccatcctccatcatattcgacgattcgttcggtgagcaagcgttcactcagtgccttgtcgatctgcggagtgttggaggctcttctggtaatggccgtgttgttgctcttcgttttgtctttgtttttgagacggccccggggtgttgcaggactgactaagcatttcggttctgcatttgaaggcagataggttcttcccgtaacagacttgttagatgcccaggcctcaatgacccgatgatgaattccacatgttgccgccatcaagcctgatcaagattgatcagaagttgagttgagctgtaggcagggcgagtgccaaggaaatttgagtcgatggcagatttagtgagattggcagttggtatggacctggaaacccaacaagcgtcagcaaaagctggtaaggtccatcatcgcggaactctatctaactatctaaggaggctggggggtggaggttgtccgtttgggttatattcaacctcctttccatgtgttgtccgctcagggaccttacctaaagatgcaggagtggcaatcgctttgtcttgtatgttggagagacaggtgcggagcacagagtggcaagcaggcccgactagacggcacggatgtgttgatgtctggtaaaaaccaacaagcgtcagcaaaagctggtgagatcccatcgcagaacctatctaactatctatggagggtgacgctggtgcgctcaacctcctccccatgtattgtccgctcaggaacctcacctaaatattcagtttgttggtgtgggtgcatgcatactgatgtatgctgcattggaaatccacttgcgagtgcgttcaagtgggcaacaagttggcaggtcacggtgagtcagctggtagtgtggatatgcctggtaaaatccaacaagcgtcagcaaaagctggtgagatcccatcgcagaacctatctaactacctatggagggtgacgctggtgcactcaacctccttcccatgtattgttcgctcaggaacctcacctgaatgtgcaatgtttggattgccagtgacgatttcctcggtaccatgcattggaaaatcaattggagtggattcgagtcggcagaggctgctggatcagctatgggaatcagccttgaaaggcggccggaagggcaagtagctctcggcgtcgacttggagtgaccaagttgggaaatttgctgactccgctgtgggtatggaggtgcctggtaagaaccaacaagtgtcagcaaaagctggtaaggtccatcatcgcggaactctatctgactacctaaggaggctggggggtggaagttgtccgttttgtattctacctcctttccatgtgttgtccgctcagagaccttacctgaaggtgtaggtgtgcggatggaggtatttgtctctgcctttgacggtgacgttggcggtgatgccatagcctgtagtgcgggcgtggtcaacacttatcgcaggcaaggccctgttcgatatggcaaagtggcaaagaatgtcaagatcactaaaggcagaggagagaaaagtttccctgcgtcagccaatggactggtgaggtctcccactcgttgcgagccaaaagaaccgtggggttgaaataacgctggagttctcacctggtatgaatcgactgccacagggcaagaagaacggtggctatagtcaaggtagttcatcgaggtggttgattgaaatggttagttgatcagactggcctgccgattgtcctgaagccgaagcccgccacggtcagactggaagtgcgtgatcgaggctggtcgaggtggttgattgaggtggttgattgaggtggttgattgaggtggttgattgaggtggttgattgaggtggttgattgaggtggttgattgaggtggttgattgaggtggttgattgaggtggtgatcgaagtgtattgactgcccagcctgccgattgtcctgaagccgaagcccgccacggtcagactggaagtggtcgatcgaggtagttgatcgagatagtggatcgaggtagtggatcgaggtatttgatcgaagtggtggatcgaagtgggatagttgactgaccagcctaccgattgtcctgaagccgaagcccgccacggtcaggctggaagtggtcgatcgaggtagtggatcaaggtggttggtcgaagtggttggtcgaagtgggatagttgactgaccagtctgccgattgtcctgaagccgaaaggcccgccacggtcagactggaagtgggtgatcggggtgggtgatatcgaggtgggtgactgaccagcctgccgattgtcctgaagccggaaggcccgccacggtcaggctggaagtgcttaattgaggtggttggttgaccaaaccagctgccgattgtcctaaagccgaagcccgccacggtcagactggaagtggtttgttggagtggtttgtggaagtggtggattgaagcggtggattgaagcggtggattgaagcggtggattgaagcggtggatcgaagtggatggatggatcggattacttgaccagtctgccgattgtcctgaagccgaaaggcccgccacggtcagactggaagtggtttatcgaggtggttgattgggggtggtgatagggtgggtgatcgaggtgggtgattgaccagcctgccgattgtcctgaagccgaagcccgccacggtcagactagaagtgggtgatatcgaagtgcattgactgcccagcctgccgattgtcctgaagccggaaggcccgccacggtcaggctggaagtgggtgattgaggctggtcgattgaggtggtcgagtgaggtggtgatcgaagtgcattgactgcccagcctgccgattgtcctgaagccggaaggcccgccacggtcagactggaagtggtttgttggagtgggtgatcgaagtggtggatcgaagtgggatagttgacggaccagtctgccgattgtcctgaagccgaaaggcccgccacggtcagactggaagtgggtgatatcgaggtgggtgattgaccagtctgccgattgtcctgaagccgaaaggcccgccacggtcagactggaagtgggtgattgaggctggtcgattgaggtggtcgattgaggtggtcgagtgaggtggtgatcgaagtgcattgactgcccagcctgccgattgtcctgaagccggaaggcccgccacggtcaggctggaagtgcttcatcgaggtggttgattaaggtggttgactgaagtagttggttgaattggcttgattgaaacagttaggtgaagtgaattgtttgaccagcctgccgattgtcctgaagccgaagcccgccacggtaagactgcaagtgtttgattggctggatggttgactggaagattgactggattgactggagaattggctggaagtggagattgctgactgaaaggattgactggatgattgactgggttggctggattgactggattgactggaggattggctggaagtgtagattgctgactgaaaggattgactggatgattgactgggttggctggattgactggaggattgactggagaattggctggaagtggagattgttgactgaaaggattgactggatgattgacggggttggctggattgactggattgactggagaattgactcgagaattggctggaagtggagattgttgactgaaaggattgactggatgattgacggggttggctggattgactggaggattgactggagaattggctggaagtggagattgttgatgaaaggattgactgggtgattgacggggttggctggattgcctgaattgactggattgactggattgactggagaattgactcgagaattggctggaagtggagattgttgactgaaaggattgactggatgattgacggggttggctggattgactggatgattgacggggttggctggattgactggattgactggagaattggctggagaattggctggaagtggagattgttgactgaaaggattgactggatgattgactgggttggctggattgactggattgactggattgactggattgactggattgactggattgactggattgactggaggattggctgggggttggctcaatggttgactggatggatgacttggtggatggtggactggatgggtgaatggactgattgggcggttgattggatagatccctaaaggcagaggagaaaaaagtttccctgcgtcagtcaatggactggtgaggtcttccactcgttgatgcgagccaaaagaaccgtggggttgatcacgctagagttctcacctggtatggagatcaaacgccacttggcaagacaagaagtgtgtatgatggacaatgcagaagtgagatccctaagaagcagagaagaaaaagtttccctgcgtcagccaatggactggtgaggtcttccactcgttgatgcgagccaaaagaaccgtggggttgataacgctagagttctcacctgaaccacgacgggtcatcatgaggcctttcatcccatgagcagagggaagacatcaagcggagtcggcatgaatcacaagcatagacttgtgttttggtctctgtaattcattagctgggtagccgaacaggttccaacattgctcatcgatgtgggacatgaaggaacgataagcatagacacacgatggggtattgagaggcgggcatgatggcatgatacaatggtaccatgggacgaaagcaatattacaacatgagacgaacacatggagtggttgggaaggggcacaatgggaaacagagacaacaaggcgagacataggaaggaaagggaaggaaagggaaggaaggaagcaacggaaggaaggaacaaataatggaaggagcaaatgatggaaggaacataccagtgaacatcaccaaggcgacgtgaccatggtgtagacgtgaccatggtgtagacgcgtcacatagacgcagaagaagagagggttgtagagagaagatggccatgaagccatgaatgatgaacaaaagcccaagtcgccatggggggatgaaagattgatgaaagattgatgggaagtggatgggaagtggatggacagatggaagcaagatggatgtaggaggaagaaaaaaattggaagagaagaggggggaggagggtatttataggttgaagctgggagtgaagctgggggttccttctgttttgggaaaagtagctaattactagtagggctgtctcaaatagggaaagtaccaccctcactaagttaacatgtcgcatgtctccactggctatacgccctgtctaaggagatgcgacagcgaagtccaagagtcagtctgggaagtccattgtctcccatttggatatattggtatctacgtcggtatattgatatcctgtacggtattataaagatatgcagccatctatgtccatctgcagaggcaagacacacgtcccctttagacaaagcataagcctgagatcacatggacacgttagccacgtaaactcatctcatacacgtccgacgccgaagatatcgacggactaaatacattgaaccgtacaagcaaggcttactagatggtgacgcaggtgtccaccggactacacggcagagaataaccttcaaacgagatgctaggaaagacatgggaatattcttaatgctgtaatgcgtctacccaaggtgatctctatcaagcgaactaggtattcagattaccaaagtcctatgttgtctttagtgaagtctggatacgcagccgagtacctgtatatataatacgtggagtatatggaacgatgtgccgtagatgtaatctcattataatgatattcaccaagtcaggaaaaggaatccaacaggttgtaaacgccggtgatcgaatggcccccgcgccatgatggaaattcggcagacaggtagagaagaacatagcatagtacgtagggtattccattctatactagaaagtacatgtaggagacaacggaaggcccaagacctcctgccaatgacactcatgaagtctccttcttgcgaccctcgacaacgcgcataacatccgtgacactatctttgtcacccttcttcttcttcttggggccacgctttctctttttcccgcctcgctcgttgtcgtcaaagtcgagcaggggaccatcgtcttcctcctctccgtcttcgttgcggcttcctccgaatcccatatccatatctgcagcatccatggcgtcttgccggcgtgcttcttcaatgaagcgcttgttacgaagggctgtatcagaagactgatcttcttcaccatctgccgagggagagcgctctcggagggctgcagctcgtttgagggcggcaagaatggttggatctcttgtgaggggattggatcgatcgacagactcctcttctaatgtagtcgaggtcccagtcgcaaagtagttcttgggtttcacaggtgctgtttcagacgcagcaggctccttctcttcttcactgacaaaagccttctcaggttttctagtagccgcacctgccacttcgccatcttcatcagacgatgactcgtcttcgagtccagcgagaggattgtaatcatcaccgacaccggcaaatatgttgtcgtcgtcatcctcgggtgcctcttgtgcagcggcacgggcagcaatatcagctggaatatccataccgaggggtttgacacttgcatcgggcatcataaggtctcccgcggcaggctcaggcacttcaactggcttatcaagccacctggtcttcctcttcgtgtttccttgcgcatcggtgatgaggagcacttcgcgtcgacgaccggtctcatcacgctccacaaatctcttcttctcgggctttccatcgctcagcttcttgaattttgagccgagtatggactccggcggcggagcaggtgcggcagcagcccggcttgccctcaattcccgcaggatttcatcgcgggtcttaggcctagcaggcggcggtgccatggtccccttcttcttttctttctgttgcttaggtacagcggaaatctcctcgagccccttctcttccatcatacgctcgaattcctcatctgcgtcttctttttcggggggtggagcaggtttttcggccgttcgcgacacgtcctcaccagctctgacccttctcagtagatccatatccagccctttgaccatgtgtgtgcttgcgaggtcacctccgactccgaggtctcggcggagtttgtcgaaggtagcttggtcgatttgtcccaacttaaccatatcctcgagtgccttgatacgtgcctccagacccgtgctgttctcattttcgtcctccgcattgcgcaatttcgcacgatcctgataaccggtgggtagcgaggtacccttgggcgcggcggaggacttgaatcgcttcgaaggtcgatcgccctcgcgacgttggtcaaatagctgacgagcaaagtccacaccagtaactgaacgtctagagcaaggccatggttgttagcttcctccgaaatcatagcaatccgcaaatctagcgacgtacggtgtcatgggaatactggaccgcattcgcgaccccagtgacccgcccggagttgcgccaccacgcgacgtatcgcgaccaggcgctgggctctggtcctttggttttgatgatgactggtcggctagtagccggcgaaactgctcgttattcatgattcgcgagctcaagttgcttgggattgaagttaagaaaggctcatgtttaagaagtgaagatccggcttggcactgataagactatctccgaacaagcttggtcacattttccctaagcaagatcggcatttcaatatgaaggcaacctagtacttgcatcgctattctctaatttgaatctacttgacagatggcactgctcggtgtagaactggatgggtgggaacttggcctagcggttgttggcgacattggcgcatgcctcttggatccccgtccatcctcagctcgagtgccgtttgatctcaagctgccggactccgggcgatggcttttgtatttttttatgattcttgtccgatatgtactacgagtgaactaggtatatggaccgtaaatgtgcaggatatagaaagcatgttgggtatcaatatatattcatcgctactaggtgactcaaatgtctcttgccatcgagtgaagggcgggaagacatatgctaatagatacaggagtcaggtcactcgcaaattttaataatacagttaaaaaaagaaaaaaaaaaccaaaacaccgagaacatgacgaagtcggacttaaccgccttgttctccttccagggtcgaggctgatctgaagattcgcttcatctcgtaattcgtggggatgtatgaatcgggcagaagctccacagcgacctcaaaatcaagaagcgtcaaagtccgacttttcccttgcatacagaacattgtgcatccctgggtcgtccagacgaatggagattgaccgaaatgcgtggattgccttcaagcattcaccttcaacataagcccgctcgtttgcgttcaggctatgccatatatcaaaagtagttctccctcacgacgttccagtatactcgcataacctgctggaaacaaacttgagcacaagatatttccccttgcgatgcacttgggaaaaagatgatggccggccggacggttcttgtggaggcgatcatacacagcagcttcagtgtcgaacctatatcgtctctcttccctcatttaggtgttgcttgtcgcagcggtggccgaggaattgcggtccttcttccccattcccggtgtagggggagggaagagtgtccattgagttgccagatacgtcgtctcaaagtgaagagaggtcaaactgagatgaaactgaatttccagatacaagagtaggtcaaacagtaaaagaaaaaatcaacaagcaacacggcgaacaaacagaggaatcagtgttgagaaaacaacgtgcgtcgggtgttgaacagtgcagagttagagaattggaataggtatatcaacgttgagagtgaaggatcaatgtggagaaagcagaaccggtagatgaagttgggaaaataaaagatcagagttgaaagtgagagacgagtagggtaggtacagtgggtagacattgtgttaactggggttagcactaagcctatttgggaactataaaggaccaaccttggaatatatgcagcataataaagtcatgtcgactacctcgggggaatcagcaatgatgattcacatctaatccaaattcgagttgaatgtagcctggtatttttgaatcataactaccaagtgaacctattgatgaaaaccatgttcgatatacagtgaaacagatgaaaacagagtagtgatgcatagtgacgaaaggaaacgagaaaggcgattaaaagacgcgatgaggatcgtttccaattcgccgctaaagattcgaaagtaagaaatctaagcgcacgcacgccaacaagcgcaaaagaaacccaattttcgttattctttagatagtctcccagcctccgttgttcatctcggactccagcttgcggctgatggttgcagggatcgagtgtgacaaccaaacatcgcgcagtagccggtcgtaccgcttctgattgaggataagctggcggttgcggcggagaccggggtcgacttcgccgtgacggtcgaggtagggcgcgtaatgccatgatccgttcgtgttgtgcagatagagaaccgtgcatttgcgaatattgatgaaaagaccaatgtttttgccgcatctattatggaagactggttagctgaagagtacatgcaaggagtgggagggtataattacttttgacgatgttggttgcagccgccaagcttgtttgtcatgcagcagactgcctgtgagcagaatatttctccgcagaataaacagatactggggtcagtgagctccttcttcgaactggggcaacggcgacggtttgcctcttcaataaggctatcaaagtacttgggcaggccaaccagctcaaagatagcagggtgcgacagactgggccagagacggtggtcttcgaagcggatgcctgagcgcgaggcattccagtggaagatccatcctgaaatgactgcgtcgaaggggctgttcgtctttcgtgcgggcttgacagacacgagaatctcgtcaagagaaggtagttgaagtgctttggttaggcgctcaagctcagaggactccacatcggcgaatcctgtgttagggaactcgacgccgtgctgaacatgaagaaggataactgccttgcgcaagaatgccaatccatagctcgtaacaagtcgccgcacggcagtaatgatacctggggtggcagtttcctctccatctttgacataaccactctcagcggggaaggaggaaccttcagcacggccaagcgagttcgccttcagttcagcaacgatcgagtcgaagaactgtttggtcactccgaattgctcttcagatacatcggcggccatagtatggtcctcggggtgggtggcgagttcctctttcaaacccagcggccaaaggatgaaagtgacagcgaccttaacaatctcagccacgaagcatatccggacaagatgtctgatatcaatattaaggactggaagcagggacaatgatgactctgcgaagaacacaaaggtatccacggcgagcagaggctcaatgttacggacatcattgagcaaagctgtgccactcaaacaagggtgcccgacaagtagctggcagatcttttgacgatgcatctcctggaactcattggtcggactgctttttgacggcctcgtggtgtgaagacacccaacagcagcatatgtcaagaccgtctctgatagaacgcgcagatgggtaagcgtcaacgaaggaattgtgtcgagcaaagtcgagccaggctctgactggacaccacgctgcgcgatctcgactgcagcaatgctgaaaccgaagctgcgaattagagaatcggtatgtacaagatcttcattgccattcgcctcagaggtgttgttgaacatcgaattgatatggttcgccgtgagtgtgctcttgagccgcctgtagctctgaagcagttcggacacagggctgtccaagggactcgacacctgctgaagtgggctggaaggcgagaggtcttcggtgggagggaaaacaccgggcataggcatgcgcgctggcgtgatgtattgtgcaggggcagttgctgggaaaaagggggctctcagttggtcaatattactggaaagcgaagggaccagggtcttagacaagtagtcgataaagacgtcggtatacggttggggataggccttctccttctccataaggactgggaagtttcgctgttgattcaaggtgtgcttgaggcctgattgaatccactggtcgaatgattcggaggggctgagcgggacaagtggagactcttccttgcccttccaggtgatgggaaggaacgcattcccaagagccttgcagagaggacagacaaactctttgagatcagtgttctcgggatggtgacgtgcaacctgctgagagtgtcgccgctgtgtcgccgcaaagtactgctcaaaacaggagtaatgcattatgtgtccacagccagtagtcacaggcccaggaagagtactctttgcgttgaaccctttactcagtccaattttttcgctaataacttcaccaccagaggagtcaagacgcttgatggtagtatggttctctccggatacaccaaatggtcgcaattcttcggcggatctgtccagacttgtgggtgttctgagcacctcacgaattctatcggagtccctaatatccgtctgtcgcaggattgtgctttcatgaaccaaggcaaaggtaccgtagagcctcgaatcgctggtctcttcctggcacaagatacatgttccgctagggtacttccatagcttcttctctggggtggcgtctgtatcggactcgagatcgctgaaatcttcttcgccccaatcgatgttaccctgtctgtccaggaattgttgctgctgttgctggaactgcgccatcaccttggcttgcctctccaatgcttgcttcttcctgatctccttgtcattatccgcatcaattgcaggagagttggtgtcaattcggtcaaaggggaatttgagagacgcagttgccgatgaatacgtgcgagggcgcttttgccacagacgtttgagtatgtgtcggattttagggccagatgcagcgaattcagtcgtgacggaaattctctccaataaaccaacaatagtcaaatggccagccttgatctctcgagcctttgacaaagcattccagttgaaggaattggaatgctcttctaccatatcagtttcctcggaatcatcttctaacactgctgcaaggataagatgcagaatcacttgaaggaaagtctcaacacgggtcggtggaatagtcggtgtacactcttttgatgaaataacgtattccaaacattggtgaacaatctgtgcaaacagcatcgttccggcgaatcgggggagatcggagaacacgccggagctaacgggtcgaagtttcggctcaaaaacaatgtcagaggcattcttgcctgtctttttcgccatccattccctgtagatgttttctgcttcgtctctttggttctttgtatagtgtgcgctgtatggatcaataagatcaagatgttcgggcttcaattcgaaagtaccagaatcactcaagccctcgggtgggcggaagttggcgacatcttccaacacatcttggaacatgtccgagtccagaagcttgtcgctaaggcgggtcgaaaggtcagagaaagacagcggcttgaagcacaagacatgagcgatgtcacgtttgatgttttcgcgggtgagatgagtgctgtcatcaatggcagtcagagatgttcggtccgtcaggaggatcaccagtagatgaacaaattcctctgccacatccacgatctgggcatcttcgtatccaggacggggcatgtagttccgggccatccagtcaaccatgccaaagcggtgcgcaatggaagcaagaactctgctgggatcacaagtgactagggcagtctggagaaggaagatatctctgtagtaggcaaagtcacgagaagagactccacggtactgcgacatttgatgccgaaggctgagaccattgcgaacccacatgccagccttcatttgcgccagccaagcgcaaactcgaagtggatagtcaaacatggccaggagcaagtcctccggcccaagggcaagcaaaacatcatcaatactactagggtttgcattcttagcggcatggatctcactcctcgcgtcattggcagcggcaaagagaacctcgcgcatagtctcgctgcttatgtctcttccgcattcaacaagccatgacaacgtgtagtgaagggcgtggtggaaactgatagatccacgttccaccacgaattcaactacgcgatgacacgggacttggccagaagcgcctacctcgaaatcgaaaggtggcagcagcttgaatcttacttcatcctttatttctgcctggtcgaaccgcttgcgttctactccagttgaatggataatcgcagtagtagtggtggtctcgattgccctcagcaggttgccaccgttgtcaatttcagggttgcggaaagactcgcagaattggcggcaaagtcggttgatctcccgcatgagaatcgacgcactgatccaagcatccgtctcgtattcaacgtgttcaccaacagcgcggacattagggcaaataccctgtgacagcttgacgaggtcaaggaattggggaagatattgttcctcggtccgcacacggtgctgtacatactcagattggagaagatatcgcagatcaaggaagaagtggtagagacgtctgtttgtaaccgagccagcatcaaatgccagagtggcgttggggttgacggattgtggttcaccgacttgtctcgtggtcaagaaggtatataggatagacatcactttagtgaggaagttccctcgcacgacaatctcttccgtgatggagggagtggtgagaagctgcaatgaaaggttgacaatcgagtggtccggctctcggtccgcgatgaggtacagttgagccagagccgtgtacaatgcagacaaacgaagacccataatgcgcttgaactgaggaacattgacaacagtgctaatgtagagatcacgcaagtcggttcgtgtcttcttccacaacctcaagtcatagagcaccatccagtctaggcgagtacgctgccacaagtcttcatacggaggtactttttcacctggaccgggaatgggcggccgaacttgccagtggctgtctgtgttggaaggcctttgccggtgcgaaccaggagtcttggggatggggatatagccagtaggggcggattcaggacctggactctgagatgcagacgggtctcgttctgcagagggccgttctgcggtttgagccggtgccggtcgaggaggtggcggctgagtgcccgtcagtccggcgagaatgcgttctgctagagcaagttcgtcatctgcacctgccaagaccatatcatcatcttcatcctggtcacgagagagttcgatgtccatttcatcgtcatcttcatcatccgcatcgtgtgcctcgacgtagtcttcgtcttcatcttcgtctataccatcttcatcaagcatgtcgtcttcgtcttcgttggcggtcaagatcacctgaccatggttaggcaaattgatcatgagcgtacgacctggaagactttcagcccgctggtggtcgtcaatgcccttcatgccaatatcttcgttatatcccccactgcccttcttccagggcgtaagcatctcctcacagatgatttgtctgaaaatctcattgtcctcgaggatttcacagccggcaatatcagccaaccactccactatcgttgtgcacatttgctcgcggaaagtgtcgcgcgcagagcgcaccgtgacagtaaccttgatctcctcaatgattttagaaacacctaagagcctgttcaggtccttcgaatactttatcacactgcggcccatatcgtttgtttcatgagcccgcgcaaggccaaagctatctcgttcgcgacaagcacgggtgacctggtgagaaacatcgcgaattgtatgcttctcgtcattccacagcatgaccgcgaattccggttcttcttcctcttcgtcgccagcgccataccagtccggacgcaaccgagaggcctcctcatcttgcctgatgccctcgacagtcttcggcagccgcaattgctccggggagcaagagataacatcgcagaagtagtcgagtgcacgggatatagtcaagcggattgaatccacaagttcagaaggcaatggccgctgcgcccgtttacccttggcattaccactatcggtatggattgcgcaaaacagcggaaggcgccatgcttcgtcatcaccacaatcacagcagccacagtttccggaggaaagcgaaatctgatattgatgtccggtgtgatccgatgagtcgaaacatcgactgcacaacacgcacgtatcatccgcggcacaggtcacgcatcggtatgtggcttccccagcacggaagatatgaccgcagcgcttgcccctcgctgcctcgctgtattcagctccttcccgggcaccttgagcctccgccagtttccatggcccggccggagttccttctgggaacagctgttgtagcagatctgtgttgtgtccgacaagcgatcggaaaagaagctctagcaggtccttctcggcagcgggcccatagcggaaattgtgtttcttgggcaaacggagaagaccatcaccgagcagcttctcacattccccgagcatgagcatgatttgtcgttgtggccgagctatcgtagcggccgctcgggctatcacaagtgggtgatggaatggagcgccgttgtcgcgacaatgcgctcaaggtagtaatggtccgacgcaggtggtttcttcgcgggtatgcaggcggaaaagaaattttcaagggagagttcaggcgatcggtccggatctcgtcgataaggttctcagatgtagttcacgttgctcacacactaatactttgtagtggggggaaggtgagagcaacgggtgaaggtggaccaatgcaggcgaacagatcagcacagagacggtgaagtcatacgcggttaaaatttgaatgtggagctcaaggtccaaaaggacaaaaaaaaaagggatacaagaaatcaaattagggatcgtttgtagagaccggaaggtaacatatttcgctatgacatcgatgggaccggtctctcagtaaacgccacatccatggcctgactacccacaggaaacacgccacattttgaacatttgaagttataaagaccaatacagccgcttatggggcctcttcccagatgtatttgatgatgagacactttaataatctgatctatttgcctcaagcatgatcttagctttatatgcaagaacactccgtgtgtttttgatgtatacgaaggcggtaaaacgcataaaccatgcagaggaccagaaggattgcaagtcaaaatacagatttccatctatcacgtacaagcccacatatgggatgagaaacaacaggcatgagcttcgctggcttttccatgcccccttacccgctgtagggtatacccaacatcactttcggcaagtctatttactcgtcgtcctcctcctccttaaccatataacggtgcttgatgtccttccattggcgctgtagggtgagagagaaatagtcagcgtgggtcctagcctcgggtattgtagacggtccatcgggaaagaggttcacatacgccctggttccagctgtcccagaccttgttggaggtgatgtcgaaggcactgttttgacatttcatggtcagtcttccgcattaagggtgcgacatgtctagcatgctcggagattcgatataacccacagctcgaaagcaaaggcgccggcaaaagcggtggtcaggagaacagtgttcttgcggatgaaggtcctaaacacagagaataatgcctcggttagatttcaattggacaatttcgatcgcgatcgtaggacctaggaaggggagacatgcgagtagataacgtttgcgagctgtcatgcgagaggtcagtcagtactggacatagcagtggaaatagaggatatgggagagggagtatagacatacgccagccattgtgagggattggggtgttttcacacgacctaaatcaaaggattggactgaaggatggggcaacgagaggtgaagttgtgaggttgaagttgcgaaggctgaatctgcgggaattgccggtacgctgattggccgagcctccggccttccgcactcaactttcgatgttcgcgttgtttttctctttcgatctttaaagctattgctctctgccttggagcttgactctgtcaagttgctatcagatatttctcattttacaatttcattacccgaatttgaccctccacaccacaccatggcctccaacgtcgccaggtccggcatcaccaccaatgctcaaaccggcgaacgatacattccctcctcagtccgtgccgacggttctaagcgcaaagagatccgcgtgcgccctggctacaagcctcccgaggacgtcgaactatacaaaaaccgggctgcggcagcatggaagaaccgcggaaaaggcggggtgccgggtgcggaaaccttgagtagtgaagacgataaaaccaagatcgcagcaaaacctacaatcaccgccaccactgccgccagcaacaagaacgccaaacgccgcgaagccaaacgaaatgcgaaggaaactgacgaagccggccccaccgctgagggcaagggcgcagagtcaaacaattggcgtgccccggcacccgcacctaaggaagaaaagcctactgaagagccgattgatctcgaagctgagaaggagaagaaagcacgcggtctgaagaagaaactccgccaggcgcgggatcttcgcgacaagaagcagcagggagaggccctgttgcctgagcagttggagaaggtcatcaagattcaggaacttgtgcggcagctggatgtgttgggctttgattccaatggtgataagaagaatggtgaaagcaatgagattccttgagtgcctttttgaaccttaaacgcggggtaagatcagattcaataccccatgcccatgtgttgagtatgtgcccatatgcatataatcatcaccagggctacctgcaaccaccatgggagtccgtcgggggctatcaggctatcctacatcattgtgacacgtgatgggaagtgtgatgtgggataccttcatggcaggatagattgccgccaatcggttccagccttccagtcacccatcgcttcgactgcgagagattcaggctgctgccacatctatccggttccctcaatcgggagtcctggtgctcccccgcccttgatcctgaattgagatctgagaactgaggagagtaacagacttcataaatggattaaatccaacattctgttgaccgaacatgggctggaattggattagacattaggaagtgaacaccttaaacgtttggtatcctgctaatgccgtcgatctccaactttcaacaagaaaaatatatattacaataatacatttaatatacatggcttagaccttcgtgtacattcccagacacaagtagaaaaccacatgatccagtcacatggtatcagatttcggagtcaacaagacgaacaggagacgtcacaatgccaccccggaggttccaacgttcataatcaaaggaagtccatggacgccacggactaggctcatcattgagcgggattcttccaatgccgtaggtggcagataggataccctgtttgacacagtcgcccacacttacgccattataccagtttcccgcgagaatgagccgcttgctgtactccttgcgaactgtgtgcgagagcttatacatacggtccagatggccgactgtgtactgaggaatagcatccttctggagacgactccgcgcgacagtcggagtatcggtgatattcatgtgtctcttgagcatgtcgcgggccattttcactgcagtgtcgtggtctggatactcttcgaaaccatcccagtaatgtccacctagcatgacggtgagtttcgttccaggtgcagaatcttggctgacttcagatgatgaagggtccgctccgttccctacactagaggacgaggcgaagatgacaccaagtccacattctgggttctgcttgtaggggatcgaacgcggtatgaggtatccaaagccatcctccacgggtagaaggttgggatttgggtaatagagattaacgaccattaccgtcacggcgtagttctgtttgcgtaatagagatggggttaagccgacggggatcatctcggcatgtgactgttcgggtttgcgcatgatgttcgcaagtgaaactggagggatagtggagatgacatatcgatagtcaaatgtcttgatttgattgtgcctgtgtgaccaatattccatctattgacagtcagcatcaatctcagggtccagggagttcagggacatagcatggcaatgcagaataattcacatacagcaatggcagcagtagactctttactcaaagctttgatctctgtgttcaatcggaggtcgactttgccggatgctttcaatgaagcaatcagtgcttgaataagctggccgactcccctcttaaaggtgaaggtactagctccagccgcaaggacttctaaatcatgctgacggcgcactaattcggggcctgcgggcatggcgtctatggccatgaaatcatccatattccgagttctcgttttagagattgacctggagataagagatgccgtaactccaccagaaaccaacccaccgatgcccccaatgcctccctcaaggttgcgaatgctacccaatagtgcttgggcactcaatcgatcgatatcaccagcatagattccatggtacacagcagagactagattatctgcaacattggggccaaaacgacgtctgatgaagtcggcaacagattcatccttcgcccattcggttgggtgccggggcggagtgaagacatccttcgctatccccgagagaaatttgttaaatagcggctcttgcatagtatccataaagatttgcaagttttccccaaaagagagttcaggctttggcgccggcatacgaacgagacggtccgggtagtaaatgtaacgatttcgggccgcggggctcgtgttgggggtaacaatgaggtcgtcgtacaagcctagatttgtagccttttaatagggtcagcatatgaaagcttttcgattctgagtatgcgcacacgagcaatactcaccaggtaaagcagagggagtgatcctggcagcgagctctttaaggtccgcggcccatactcaaacacgacattgccaccatcaacaggaactgtttcagaatttatccaaccaccgagccggtccgttttctcgaacaagatgacctgtttgcatgtagggtcttgcgcgagttgccaggcggctgtgagtccagtgatgccaccaccaagaacggcggcagtgtatgcgcgtttctgatcattgagatgaatcaattgcgttcgtcttggtcttactgctctagagacacatggtagcaacatctctgctgatctgagcaacgttggtggtgggataattaaagctaaacccgaaggtcctcgggagcttccgtccttacttaagctacgcgggcagcctccagggctggtctgcctacagcaatcctacgcttgcacagtggttcgtgagacattcgcgaattcatcttcgcttcggtattattcttttgaaggtcaacgggggaatctatgaacagaccagataatagtatctgaaacaaaagcaaatgcataaagagtatcaacgccattccctccagccattcctcgttcattgatcaagatcggattgtacatagtattcttcgcttcagaaacagactgttgtgggacgtgtgtttttttttcgacttttcttcattgtcagtcatgtcaggcggagtcacgcagtcagctcctggctttggctctgagtgttctcctcggtctccggtttgattaactcttgcggtccatccacatccgtgacaaacttgcgctcgctgacatgctccccagagtgcggagtccacaccttgtcggtgtaagcaccgcgctggccctcggtgtgcttataggggcacttggggttcaggcagggattaaacttgcaggcggtctcgacatgtgtaaacttgcatccttcagtcttgcagtcggctccattgcggcagactggcatactcgggtgcttgaagggacaggtggggttggtacagtgaggaaagaaccgacacatggcctctgcctggtgagcggatcgcactgctggtgaagggtggcgcccggtgcatttcttgttcttgcaagcagcaccgaatgagcaagtgtcggaaggatcgattgaagtaccttcgggggcggcaggtgattgatgggcaaacgggcaatcctgtcgcgagcatcgttggttgaagcgacacacagtgtcggggttgctttcatcttgttcaccacccgttgtgctgtccatgtccacatctgctccttctgccgctctcggtttgttgtatccgcgctttcctccacgctggccacctcgctcgacccgattgaagagcgaacgaccctgagggccattctgggaaccagtctggaaagcggggttgacagcgggtggcatgaagccaggcatgaattgcgacatcatgcgagcttgttcctccaacatcgacataagctgcatctggttttcgggggtcatctgcatcatggggttgccttgcattcccatggcacggccaccgcgaccattttgttgtccgcctctcatttgaccccggccgttgtgaccgatgcgcccgtttccttgtccccgcacacggtgcagagctgcatccgagccacggtctaggtttcgattgatttggttcaacatccttcccttgccgcctctgccgttgcgcatcgctttcggtcctgtggggctattgaggagcactgtcagcatgttataggcattagcagaaaggcatggtaaaacctacatctcgtttccggcctccgccatctcggcatcctggccgttggcctctccgaacggattgggcgtcgtttgagctgagttgtcgaattccatggccgaagggttcagctggcccatggtggtgtcgttcgaggctggagcagccccgttgatttgttggttgagcaactcgacttgagtgaaaagccattgtgaaaactcgagggccgcagtgtcaccttcctggaggccaagaaaatcatttgaaagctcggtggctatttgctcttcagtcttgccgttgaccagcatgagaacgatgtattcgatcagtggtgactcttggccatcactccaacccatctccaccaatttcggctggatgacatttgcgactgctcgcgcaagaggcgtttccaaggtgatttgaggcagcatggcgaaggcgattgtagagtcagggaaaagtgaaaggttggtgagaaattcacaaagagggagcagtgctgataaaagaacttgcgccacccgataaaggcgtttcggatcttatcggcgcgactaacaatgaagatgcgattaaaacggtaggcgatggcagttgaggttagaggtgagttttaatagaccagtaacaggttctggtagagaaagcaaaactttagcaagcagattgaagtgaagctaaagacccgacgaccaaaacggatgtttgatcacgtggctgtggctggccggcggtgaggtggggcagaacatacaatgcaaataaccacaaggttgatttggctattaatgaagagaaggtcttgctttgatcgaactgtgttgcaatagtcagatgaaagagagaagaaatctgacttgttgaaaatcataaggaatggaccttgcaactactgaagtttgggtttatatattcacaatggctattgttccgccaccaagatgttgagttggttgttgtgaatggggctaaatgggttctatatacaaagagagtatccagacaaagagactcacggtcaagtgacgtctaagaaaggaatagcaattgtcccaaggcttctaggtccgtagcctgaggcatggatatattatacctgaaatatcaggcatatgacactgcctcaggccttgatgaaaagcatgtacgcataactatgtagtttagcggcgtagggacgtttatgtggttgcaggccacctatccacaaagcgctgtcgatctccccgctcggaatcatatgccatcaacccctgtctgccgaggtgtcatgtcttcaccatggggcatcttccccagatcgtcggtgcccccacaataattatacggtgtgaaaccgagaccacaactgaacgctgtggggatctgtgcctaggccaaccccatattgcaatatcaaatcaacgagggatcaatgaacaaaggatgaagtcacataatgcggggttcgcaagcacggctcctttaggccatcctctacacctatttggggcatgaggaacacacatcattggatactaaatgttcagaggtattctctgaaaactagtgtggttgtgtccccagattgataaacgctgcaacccgtatggttcatactgtttgacaagttcgtcttcatgactagccttccctgccgtatgttatccaacataccagtcctttttctcttattctgaacgcgccctccaagacagaagccagactaaacctaacttggtatagtctaacggcgctatgattgaagacctcctggccgggacgacattcagtcgggcctcagtattgcttctaggactattcgttgcattctgcgtgttccggaagttccaagcttcagcacaaatcgcccgtctcggtgtcagagctcccaaaattgggttccggctcccatacgctctcgattttattttccaaggttaccaagccaatcaagtgaaccgcgatatagagttctgggatacaaaagtcggccaagcagggggcctaaacaatgtgaagacagccgaattggacgctggcatttccacccgtatggtcatcaccaaggacccagaaaatatcaaggcagtcctcaccggtcagttcgccgactacggtaagggtgaaacctttcaccaggagtggaaggagttccttggcgacagcatctttaccacagacggcgaactatggtctcgctcccgtcagctcatccgtcccatgttcgtgcgtgatcgcattgtcgacacggaaatcttcgagaagcatgttcagaaactcatcccgcttcttggcggcagccactcacccagcagcagcaaggtagtggacgtcggatcactcttcttccggtataccctcgatgcagcaacggactacctgctcggccagggcacagacagtcttgataacccggcaacacgcttcgctaaagcgtttagatatgtgcaacagcgccaagcggagtacttccgtttcgggtgagtgatgagactcgatcctgtgcgacgcaagcacaagctttcattggagctcgcagaacctaatctaacaaaccctaaacagagtctttagctacttcatgtcacgcacggaattccgcaagaacctcaagatcatggacgagtttattcagccatacatccagaccgttctcgcccactcacccgacgaactcaatgagaagctctcaaagcacgagaccttcctcgatgccctagccagctttacccgtgatccccgcgtcctccgtgaccaacttgtcgccgtcctcctcgcaggccgcgacacaacagccgccacactatcattctgcctcttcgagctgtcgcggaacccagaagttgtcgccaagttgcgcgacgagatccgcaatagacttagcgtcggcgccaacgcccagaaacccagctacacggatctcaaggagatgaagtatctcaacgcagtgttgcacgagacgatgcgtttgtatccagtcgtgcccttcaacgtacgctattctttgcacgatacgacgcttccacgtggcggtgggccggatgggctagcgcctgtgggtgtgcgtgcaaactcgcgggttgtctactcgacgatgttgatgcagcgggatcctgatctgtatgacggccctggatcgaagaactacttcgatcctgggaagtggattcctgagaggtgggtttccggctggcagccccgaccgtggcatttcattccgtttaatggtggaccgcggatctgtattgggcagcaatttgctattattgagatggggtacacagttattcggattttgcaggcttatgagcgcattattgcgctgccggtgggtgggaaagacaaagttgaagatccggtgcttcggtttgaagttactctcagtcctggctccgagttgaattgcgttttcctcaaggagggcgaagaggctgtgcgtagtggcgctaaggcaagagttgcttgaggtatggttgattcttcgaactacagtatgatatgatatcttttgagacatgagtttatgccctactgttagcttttcgaacaaggtggaattcatattctcgcattcttagtatcccgtaggtagatctaagtggaaatataccctcgcaaaaaatccctaagagccctacaataaggcaccattataaatttctgacgcatccatgcagtttgtagtagattttaatttgctttgcagatcttcccaggctttgtgcttttgtctcctttgtcccatgaagctatttagataggctccgtggcaccagatagagatcatcatcagcatatatgctattgagtcttctgttgatcacctctttcttctcttcgtagatctgtggacactgactccatcaattccaaatcctgacataactacgtgtataggaagaatgccttcaataacaagtcgttgtcagtactagtcctggcaacagcagacacggttttactcgtcatataaattcattcagaacacccaaacgaacgaagatgtatgtacagaatcgatttctcttactatagcactttttggccaacgacaacatatacggcggtttggccgagtggtctaaggcgattgactagaacgttcttgagatcaagttaaatcttgaaatcaagtatccttaatcaattccgttcgcgggcgcatgttcgaatcatgcagccgtcgtaagctttttgcttcactagcctagtgtggcgagacatctatagaactaagaagattggaataggaagaaggcggatctgatttttaccatacctactaactaccttcctacctatgtatctatgtataattatgtttgatttagatatttaataactatagcacgacatagttatgagttgttacctagatagttaaattctatgccctaacaaaagggaaaatttgcgtttaggcgttaaccgattcggggttagtgtgtttacttggcacttggcaaaaccacatcaggaaatccacactatgcctttgtcacatatattaagggtgtgtctagcaagcaaaaatttgacgacggctgcatgattcgaacatgcgcccgcgaacggaattgattaaggatacttgatttcatttagcttgatctcaagaacgttctagtcaatcgccttagaccactcggccaaaccgccgtaatgagaaaaggttttctagattttgcatcgcgaggaagactgtacaggtcatcttcttgggaaataagaatacaattagtaggagtttgactgtcgcttccgtagcttcctcagtctttgcaaaatctccactttccgcagctccatgaacaaatcctcttcatctgcatcatccaaatcacatagcacactccccagacccgtccgtacagttgggtatgtggcttcgatctcctttactgagacatgagctctctctttgacagcggcaatgtatgttgagcttttaaccacatctgagatcaaagaagtatccgagatctgcaatcctttagacggaggtagaccagaatccttcgccggtgcatatgtgccgtttttgggactagcgacctctttttgctctttttgctctgtgctcttagatcccacccagcctctactcatctgcacagccttttcccattgtccgaatttagcaacactctcttgtcgcgggacttggggctcgaagaccacaccgccagaacgattgatgtcgcgtagctcggcaaagttgtgccacagtccagcagcaaggcctgctgcaattgctgcgccgagagctgtagtttcacgcatcttggggcggtagaccgggatagatatcaggtctgcttgagtctatattttagatgagattaattcttgtccaaaattcatcgaggtataaggtaagaaggcgtcgataggttcttacctgcattgccaagtctgagttgctcatacccccatctacagccagttcggagagtgcatggccgctgtctttctccattgcgtctaggatggctttagtctggaagcaggttgcctctagagtagcacgtgcgatatggcccttttgggtgtattgggtgatcccaactgcacactgtcagatagaatacaacagtcaggtgatgagaagagaaactcacagattgtaccttttgcgtcatcaatccaataaggtgcgaaaagtccactgaaggcagtgacaaatacacatccaccactgtcttccaccgagtaggcaagttcattgacctccttagactcctggaagaaattcaagttgttctgcaagaatttgatcccagacccagctacagcaatgcttccctcctgtgcatagataggcttcccaccaaagtggtaagccaccgtagccagtaatccatgtgtcgagaacacgggcttgtcaccaacattgtacagaagaaagcaaccagtgccataagtgtttttcgccattccaggcgagaaccctttctgcccaaccaacgccgcagactgatcacccagacatcccataatcggaacccgtgccaacgccccagaagcaacaaccccatacgccgtcgcatcagacgagggcacaatcctaggcaaatgaaccttccccctaatcccaaaaaagtccagaagcgtctgatcgtactgcaacgtctccaggttcacaaacatggtccgcgaagcgtttgtcgaatccgagacaaagacgttggcagccacgccaccgttcaaacggtagaccagccaagcatcgacggtaccaaacgccagcgtgccgcggtcaaatgcatccttcactctggggacatgcgccaacatccagagcagcttcgtagccgacgagtaggttgacagcggcagaccgcagagagtctggagctgcgcagcccctggtttctgtttcagttctgcaacgatcgcctgggagcgtgtgtctgtccatacaatggcattgtacaggggctcgccggtctcgtggtcccagactatggttgtttcgcgctggttggttattccgacgctctggatgctgcttcgggtgtggccttgtgtttcgaagttccggacggcttcctcgatgcaggtctctactgaggttacgatctcgagagggtcatgctcgtgccaactagaagtgattaatttgggttaattctgcatcctaggtgggctttctggctattggactggactgggacttaccccgggttcgggtagatttggctgaactcgacttgatgtgatgctactgggtcgccgtcgcggttgaagatcaaaaacctggtgctcgttgtgccttgatcgatcgatcccacaaaggtatctgagggctgcatggttatggatagaggaatctacggaggaaaacaaatcgagtttggctatttgcgcatgacatgagatgtcaaaccttgcgatacaaaggaagaactcgagatacagcagaccccaaatacataagtaaaagactttcctggataataacttcacggtcacacagcggggtgctcatggaatgaggggaagacaccgagagaagggattggtgggattatcccttggccagacgtgagatgagaagtgagaacgggctgtgcggcgacatgtattggcccttcgtatagactcttcttggggttcttggaacttgaagtggaattagccaagtgtcagtgcactttggactcattagggaaacgatatccccatccccaggaaaatggttccctcgttccgacttcccccaaaccccagtatgacctccgtgcatattgtggagagagatcagcagacgattgacgactcggttgatttggcgaagtgtcagattcaacttggtggggaattgcgcactgactcggtctttattccattgtcatattaaaccacacgaacatctatagatggcccaaattgcaacggttaggccggcattgaaattttatctgcaagcctatattggcttttttttcccacggtgaatactgcggtgctaacaagtgataactaggggacatctctatctacgacactcgcagagtcaaatccggacaaccccggtctcggtgatactacctctaagcatatggtcacacagttaacggtcaattgtgtcactacggacgagaaatggaaaaaagcaagaaaatactaccctcagtatcatcattatcgggaaagaccaatctctttccgctctcgcctccttttggagaagcctgccgcttccaggtgacacagtttggactttctagaaaattacaattgggcctgcgtgaggtctggcacccgacgagttgatgagtaacagaaggcagacaagcttctactacagtcatgacagaggcaaataccggtaagcgggaactatacacaacattgcggtgtccaaaaagtaccctaaagaacacccaacaacacccaaccgggatcggacagtgacttccggctgcccaggccaaacggcccttcctacaaacgacccctgaaataaactatgagcagaggtgcgctgtcagaaaattctactctgcgtgaaagggaaacaaaaaaaaagaaaaagaaaagaaaacacggcaacaaaaggcacaatggccagcccagccagttcaataaaagggatatgtgcacttgatgattccgagtctatccggatttgacttcagctgatatctttcctgcaagcttgaacgccctctggagctctggagcttggaaccaggaggacaagagacacacagacacactctcttccaggacaagaccctgcatcagccaatggaaccaccgtcttgtacgaaggacagcacagattgagagcaaagggttggttacacggtcgttcctggttcttcgttgttgctataccggaagaactaccttatcattcttgtgttggcgagattccccccggttggtcgtactatatcaactcgaagccccaaccctggctcccggggcttaggttctcccttcgatggccacctggaaagagcttgagcttgattcaatgtcaaaagtacaccgtgaaactctctcctccgatactcatgacagcggctgtggctcgctgtgtctgacggacaagaacgaaacggctatccaccatatcaaccctgaagtcgaaagcccttatactcgccccctggtgtggtttaaagtgcgggagtactgccatgaagcgttctcagagttctttgggacgatgatcctgattttatttggggacggggtcgttgctcaggtcctactcagtcatggtcagaagggtgactaccaatctatttcttggggatgggggtaaggctcttctcctttatcgatcacaattccatacgctgttctaaccgatctcatttaacagactgggcgtcatgctcggagtatacgccagcggggcatcaggaggccacatcaaccccgccgtgacatttgcaaactgcgtcctccgcggcttcccctggcgcaaattcccggtgtacgcactagcccaggtcctcggtgcaatgtgcggtgcggccattgtgtacggcaactataagtcagccatcaacgtctacgagggcgggccaaatatccgcacagtccccggctactcgatgacggcaacaggcggcatcttctgcacctacccagcagaattcatgacaaaagcaggtcaattcttctcggagttccttgccagtgcggtcttgatgttcatgatatttgctctgaaagatgacggcaatctaggcgccggggcgctgacacctctggcgctattcttcgttgtctttggaattggcgcgtgctttggatgggagactggatatgctattaacttggcacgggactttgggcctcggctgacctcctacatgattggatatgggcatgaagtatgggctgcgggggactactacttctgggtatgtttgtctgaacatcacatggaccaaactttggggacttgcccggcttacggatgttttcctattagattcccatggttgcaccaatattaggttgcacattcggggggttgctatacgatctattcctgtatactgggatggatagcccaatcaacacgccctggatgggaatcaagacgctgtgtgggcccttcggtcgaaggcgagtcgcattgcagagtccagtctgaaacaatcctatccttgctcattatatccgcaatgtaggcgtggagtggtgagtactgtacttgatttgtgttgctttatcttatttatgatctgtctatgacaactacgtgtgtaaaaaggggtggaacttagcgatgactgttatgatctgtattttgcactatttagccagtttctgcagcgttcttttagcatcatggaatctactttaagttcttcaacacagtccatggacttcagtattttctctcctatttaagccagatgtcttgtccgggccaagtattcgtcggctacgtctataagtcatggggtctataagagatataacagccagtcattggcacaaccattgtattgtgtacatttctctacacgaagaaaaatgcatccaatgtatgaagggcatgcagggcgtcatccctctctatctcgactgcatgattccagaagggaacacagcatctgcagctaacttacttttcaactggctgttctagtaactcaatcatcgcacgcatccaacatagatagagccctaaagggagtatggttaaaaccatgtcctgaacttggttagctctcgatggcctattggtgcaactacggggtattgattggtgactggcatgtctataacaccttaactattccggaaattataataaacttctattactactcgatccggctttagacgatattctagtattccgataaatagaacggtttataaggaataagtatctcccccgataagcctctcctatactctacgctactcctataggttaaaataattagagtcattaactactagattttttcgataagttactcgcccttatagcttacggtatgcacaatctctgggggccgaacatagtacgcttcccagtcatcgactgtcgcgccctcaaaggaggggtcttccaagaccgttggggtgaatgtgtcgaggagatcaaggccattataaaactcaaggtatcctggggcggcgctcacgaagtgatccataaaattctgccggtcagtattgttttggtatgtgcatcgatagatcacaaagccccattttttgaatccgtcctcgtcaaggggcttctcacgccggtccgccgcataccgaccggcatccattgtgggatcatgtttcgaggggaccattgttgaaagtgtggtaggagtatccccgaaatgtggtggtataaacgcgggcttcgcgagacgcgaaaaagcggctaatgggagcagaagagcggacaatactcgggcggctggaaagggcagatttgctgtagaagcgggtggacacagagcgtggaaaacgtgtagttcgaaggaattttcttgtaatcatatctaggtacatatgtaggtgtgaaggcccctgttttgtcatgaggcgacgagaggtacgagtgggaaaaaaggcggggtgatttgctctccaagttgagcaatgtcatgcaaggaagaaatatactagaatgaaacgaaaaagaaaaagaacgaatattgtcgcggtgaaaagaaggacagggtcagaacggactggagcatcaatgcacccgacttggagaaacccttttacgggagatgcagacaccccctcaatccatgaacatcagatatctttggcatttctcccctccagattttcctcccgaatctcattacgtgatttatctcttccagacgcggtgacgctttctctgggcttttattggacctgtacatgtgaagaggtagcaagcccctggcagttccgagccttgaaggtccactatacaacctgagccattgtcaatgttctcgttctcacaaatggacactaacccgaagccttttcgtgatctgctcgaccatcatcgtgatctttttgtagatccactcttatggacttatcgccaccttaaactagtgggttgtcgatttgaggacgccgacacggccagcacagaatcaacccaggacgactgcaagaccgacgatgacgaaaggccttgcccaaaggtacccagcgatgctgagcagcttgcaacataccccattgctgccgtaaagtatcgctgccttgtcaacattcttgtcgggaagggacgcccatttaaaacacttcggtaagatatcgcgtgaaatacaatgtctaacaagtacacaaaaagtgactgataatttcgctgagcagcaaaggacctcaattctacttcacagacaaacctgtccatcggccaagacatactgtgttctatcgccaaggacagtcggacgcacattttggcaaaggcttgtttccgttggttagctacctgcactatacaagtgtcaacggaggccgtagagacaaattcgagccttgtccaggccccaagggaactctcaattggatcggtcaacgtatcctcgaaaaacgactggctcaaatccaaccgaaggaatggacagaggatccatatttcgtgtgtatcttgctagctcttgcacaactccaagagcgcaaggttgagtttccgaagccagcaacttacacggtatgtctatcttcaatcaggcttgttcttctttcctcgggaactctaacttttcggcatctagtcgcgtcttcttgtaaccaacctgtgcgacaaggaatacatccatctttacgaggctgaaatctccgctgaacttcttggggcgctcagaagcccgacaactgccaccaaatatacaaaatggcctactattcgacgaaggaaactcccatacaagccttacaacacctttgcggaccgcatcacggctgagctagtggctcctagtctcctgtgctcgcctgagatctcgagtctgtctgatgaagtgaatggtgtcgttagatgcggcacgaaacgaccgtccgagccagaaagcaataagacatacaagacggaacgaataacataaaccagtgatagtccatcaaatcagactatggcccgcaagtccaggtcagcaagtctaggaagattgtatgctttcaaccaggctgccggatgatattgaccctcatatttgtactaccacgatgccacgcttgatcttctctttctgcaccactatttgtcgaatacattttaattcatctagatatgatactatggagctaaccttctatgtacatagtactaaatatgtaggtggtattgaaccggatcaattcaaaccccgatataccgagtctagtctgtacccatgtcctctaaaaccagaaacagaagatattttgctgcagatcgtgataggagtaatactaggctctgttcttcttcccaacacccaaaacacaacctcgattccagcaacatctatcccaagccttgcccagcctacagagcctttcaggatccacaatggacttggaaaaacgccccgaccactcgcagatattgaatcaacaaatacgggcgaaggatgaccctcgcccccgtcaagtcccatggctggagcgctttctggaaaggattgggttctttaatcacaagtacaatatcatgtacgagccctatataactcttattttgcattaccggtcgctaatttcatactggctaggtatatgttatgcgttggcctatgtccgtatctatttgaatacctcgtctgccgtcaatactgtgatagagaggattgccgcttttaccgcaataccgcgtcacgctgtacagacatcttgctatttctttaccttctccgcattcagtacttaacctggtctcgggataggcgagaagacgggcgacgaggattgccgctgtgggctgtggtcctatacattgctatgacaggcagaagattgctatttacccctgtttcatagttgagtaaggaaatgtatgcatttattattccttaaccattagctgggaaacatgtcatcgcccgtatgagaagtgaaagaagccgaaagaaccgaaatggcagtgttgcgtccaactagacctagcgaaaggggacaaatgaatcgccaaattatatcttggtatttagcagattcatgaaataatatgtagtgggagtttgagattaaacggagctgaggcgcattagatattgaaatctagtccttccaaaagctcctgttgaacagtgtgaaatgaaaagcttagatgctgtgtacatggctaaaacaacacaagactgtagtggtgttatcgactcagaactggtactatatacttcaaacggtggaagatgatgtggattttggaaggtaatctcaccttgtaaagtccataagacataccagctctcacaatcagaagtagtgaccaagttcatatacatgcttgcaggatctacggatagtgctacaaggcaggtaactctctacagaaaaacatgcacaattcagaaccgatatcaatgctgctaggagtatgatgcagatacacacagcgaaggcacgcaacgaacatggacacctatctcacataaatggaaacaacagatccgattcgactaacccgcaaggctaggatagaaaatgcaatgcacacctttaccgcttgcccttcttacggggagcgacaaccttgaacgcagagctggcagcctcttcctcgcgttgagcagcagctgcaacggtagcagcggagcccttcttggcaacctcgctccagccaccgccgttcttctgctctccgaaagcactgggcgagacagggtccacaatgcccttatcggcaagcttgcggcggcggatgaattcctccgcgaagcggcggccgtccagagtctgggagttggcgtagacggagtcggagatgatctcggcctcggcgggcaggaagagcaattgctgaacgaaatcgtcgactagaggcgggatgttagtacggaaactatgtgaattaaattgaagacaacgaaacttaccattgatgctgctgttcaaccctttgctcagagccagagtagcccacttggtgaactcctcaacagcctggttggggttggactgcggggtgctgccgctggtcacggtacgggtagtggcgacagggcggggcttggagataagaggcgaaactgggacggttccgctggctgtgcggggtcccaggggcggcgcagttggtgcgcccttgaccttgccactggcaccgacggtggtccaggcgctggatccctggctagcgggggcggagggagcagggcccttgctagcaagatcggcatagcgctttccggcagaggagggcacgggagggcttggggtcgcagccatggcggcggcggcagcagcagccgcgcggttcttgcgggcttcctcttccttctggatctgagcaagagtcttcttggcgccagtagcggccggtgtgggctgggtcttggtggcccaaggggagccggtcgaggcaggggtggccggagatccagcgctagcccagttcgctgacgagggaaggccaggggctgcctgtgcctgtgcttggctgagacgctcttgctccgcgaggaattgagcacggcgtgccgcagcggcgacttcctcacgttgggcggccgtacgagcctcggcttcctggatctccttgagagaggggcccttgggcaagtcatttgcctccttggcccatggtgcgacagaggtaggcgcagcgtcgacgggagtctgagtctgggagcgggagccagtggccagagactcggcgacgttttggcggttacgctgggcggtgggtgcagggagaggcgacgcggagggtgggggagggaaaggctggggcatggcgtgatcaaccttgtttccccagaccgattcagaagggccatggctctgttcctgttcctgctgctggcgttgagcagaagcagccttgtgaacttgctgggacagagtaagaggctcagaaccagtaacagagtcggtcaactgttgagctgcctcctccatctcggctgcaacctcggcttcgagttgctgagatgcagcggcagggtgggtaggcagaccttcggcggtgcgcatgcccatctccccttcttgggcacgaagagcatggaattggcgaagacgctcctcgcgagcgtgctgatcaaatggatcatcttcatgggccttgtcgaagtcttcctgctcttgctgaagctgagcacgatcctgaagcatttgactaacctgctgggactgcaagaagttatcaggctgacggccggagaatgaaccagcactaccaaaggcaaacggatcctggcggccgacgttcaggcgatcaagtagagcggggagttgatcctggctgccgaaatccgttcccagcattccaggtcctacgttcaaaccgccctgtctcggtgcaacaccatcgaagaatccagggacgccttgggactgctgctgcatgggagcctggatcggagatggctggtagccaacgggtgaagtaatgcttgagaagctaggctggctttgaaggctatgcgcgctagactgatgctgcagcggtgggttcatggaggatgagggagcaccaggaggagccatttgcttcataatggcctgctgctgggccaggtgctccttctgtcgagccatcaggtactgttcttcctgcttgcgtcgctcgagcgcattctgctgctcggctgttaaggtagtgccaaagcttgggaaactacccgggaagggaggctgagcagatccagcggtcgtgttagtccactgggcgacagtcggttctgggccatgtggaaggccaatctggggcacaaggaatggctcgcgtgagttcccaatgcgtctcactagctgagctagcggctcaaactcggtgtcctcaagcttcttgatttgcaagtctgggctgaagaagcctgccttgaaccaatcgtgcatttcgagtccagtccacgggccttggatattgccttgcggatcccggtagatccaacgcatcctatccggcatgaccatggtacgctgctgagaagcagggatgcctgcgccaggggtttgactagaaggaatatcatgaccagccaggtttggaatagagccaacggccgagacgggtgtttgcgaagcaggcgttgagccaggatggcttgcctgacccgccttgtccccttgcgaggggtcgagtccatctaggcccacagaatcgggtctgccttgctcgtcctgcatggaagagaagagggcaccgagtttgcttgatcggccgatgcttccagaaccagtcataccggcatgggggctgaatagaccacctccaccgagagttgacaagctaggagactgaagatcgcccatagagccaaagatcgggtcaccgaaaccgccaacaaatgcggaacgctcacgagtgggcgtgccgacggcagcaccagatgaccaagccgaggctccacccagggaagacagaccacccagaccaccgagaccagagaaagtgcggttggcattgacactggagttctggctgcggtccacagtgggaagatcgattcctgagccaacccgtctcatcgagccgaaggggttggaaggatcccgaagtccgctgattccgggatgctgggcgggctggatatccgatccgtcagtgtcgacatcttcgggttccgcacgttcgccatgacggtcaccatgcgggctctggtagggattagtgttggttggactatttggctcgtggccctggaggaggctgggagtggggttccgcgagttctcctggctttgcatcaactctcggaatccaggaatgctcgaggtcatgccgaatgcgccaaatccaagatcagattgagcgggaccttcaacatcctgagaaccgccaagagcggcgctgccactgcgaggctcgtcgaacggattagtttcgcttcggttgacacgagtcttgacggcatctccccagggcgactgcgaacgcccgtcactgtcgttttcagcaagacgttcaaggttacctgtgggcttttccttggcggagctagcaatatcttcagagctatccttggacagcaaacccttgaatctgctctctccgcggagacttccgtatcctggtttcttttcagccgtgggagtgccagatccagagccagaaccaagagagaaagctccaaaggcacccatcggagagaaattggcattatgggaggccgaaccccagggggagtttggtccactaacgcccgtattgataggattggtggagctgcgcttcagagagccaaagggagaggcagggtcctccttgccctccttggccttctcatccaccttcgggttgggttctcggaaatcagttttgcgacgcaacagggcaggtggaggagtagaggtattggcctcatcgcggaaaaatcgggagttgggaccggtaggagacatggggttgccaatcgattctcccgtttcccggcgtcggggacccgggcgaccggcggttggggaggaggtggtatagttattcatatggccctgaggataagagatcgaagatttgcgacctccagctcccgggatgatgttttccttcgcggcgtttgtgggaggtggcttcagaggggagttgacagaagcggagaacatctattaagctttttagtaagagcactcactcagacctgaaagcacagaacacaaacctctttctcatcctccgtcatacccgtgattccgaggggttccacctggccaccgtgatcccagcaaacctcgggccccgcagagttgttcttgtggtcatcccgcttcccccatgctccattcacaggagctgacacagtgtgagggtcccagtcggccacgaagtattcctccacgttcttactcaaggtaccctcctcccgctgtgttttatacagctctagaagttgatccttggagtaccgggcgtccccattccgtgcaatgttagaagtatttgagctcaggtgtggagggatgtacgcgccgccggccgtggatgtcgaggcagatgcaggctggctactatcccggtggtgagatggggtggtagcaacagaaggacggcggaaggtctgcgtagctccgttcatgcggtttcgggacctaatgggcattaaaggttagcatcggatatctcgagctcaaaacattgacggccacaacagcacggaacgatattggaccaggtctgtcaaaacacagctaatggaggggtttggggaaggtgaaacagtgtctgcataccattctccgctagtcgaaccatcccccctccggttggggtcctgggtgttaccagcagcggccgaagcgaaactcgatggaagtggtgtaggcattgtggtaaagaggcttttatggtcggatgttgatcccccacgtaaaaaccgattctgagatagttatcgcgagacctgtggcgggcttgcaagagaatgtgtgatgcgaacggataagttgcaagacacgagattggaaaattggtgtagagttgaaggatgacagctaggagctagtcaatcgaagaagcggggagctgtgagaaaagtaatgcagatatgcgagcgccagactaacaaggtcgagaaaagagagagatcgagtttcgatttcgcttgggaagtttcctggagcaaaaatgattaagcggtgggcgtggcaatacgcgtgccttgttgtaaatacacggtattgtattgccggtggtcgcgtgatttgccgtcaaagagtggggcgttcagtgtattggtggaacaaccaattacataccgccaagagcaagtatccgatacacgcacaacactgtgtcttcatactctgccaggtgtatcttctaccttgctttagacacctttatagcaaagaaaagagacgctgtacgaaaagatgataatggtgactacaaataaccagggtgagatttgaaccagaatactactttcctccaactcaaaaatactatagacaactagcaaggacgtatgcagttaggtggcttgacgcaaacagagagatgtggcaacaacaggctagacgtgtattgcccacaaaagccacgctcctcttttgattggaagttcaactgcttttcagacagtttgacagtgagggattggcttcttttgacttgattttgtctaagcacacaaaggagagtgtctagacgttccacaaatgcaatagagggggttgagatgcatccaataccatccctttctagccaacctcttgcaatactgggcaaacatgccctgtcttaaaaaggttcaacggtcttatatctttacattcaggctggaatccggttgggttaagaatcccattatccagttgtgcctgccaatagggctggatcattgtgtcgccctttgtagacctctactgtccctgtttgtcctttgatgcttcattctataccagacaatgctttctgagatttgctcacttcaagagtcacacagagacaacgcaagacgacacaatgaatgctttagcccaaattgatacgatgggctcattcttagagcttcacagatgttgtcaagaccctataaaatgggcatccccgtctccggcaattcccttttcacagttctttctctccaagacaatccacgtcatcctatgaactataagctttcttgcacaacaaaggtcgtttctctcttgtgtcttccggtccccaagccctcatcgcctttgatcaaagaatatggggcggtccatgttcagcggtcgatccaagcccgtcgatccacaattcggctggtacttcgctggtgagccaatggacaagagacactctcgaagcaggggaatcaggctagttcgctacggacctgagatggaaccttgtgcccacagtcggtgtccatcaccatctcccattacagaaaatacaccttgcacctgcaccaacacatgcgagcttcgctcccacgggacacgctcccaatcccaaagcgactcttactcctctgtttccgagtcagtcatagtatgctgcggaggatgtcacgctatcagacgcgagcccgggccctctcctcaggtggagaaagtgatatgcttgtgtgaatgccactcgcgagagacactcccgatcacaccaagaagcagtggatattccagctcagaatcagccacgaaacgctacggtagccgtcactcaacaagacacgagcgtcgttccaacgacacacgtcccaccacaccgaacagcagtgatttttccgactatgaactgcccaaaagacgccgcggtcaccgcatctcaacacgcgaaccagagcgccatctccagttggagaaattccacggcgaggctcacacaccccctcccagcacaactgcgacgtcaggccagagataccactccccgcgtgcgtcgctcgcgacagcaccacgcgccggcccggtaatccagcgccactgccgcaaggcgtcttactgcgaaaggcacccggagctgtgcagagctacgattcctgtgccttcgccggtgccgagaccaacgccaaccccaacgcgctctccccggtcgattgaaaagccccagcacaagccgcgggccaagccagagccgaaacgcacctacactcaggctgcttcgccttccaagcggacgcctcccgcaaagccagtgccttcccccaagcctatgtgtcccaggcatggtgcccagcattgtggctgtgtctacatggatgggtaccgtgctgatgactccagctattatgctccttatgacgatgacactgtttccgagacctccatccaggccatgcctgaccatgacagggtggacgagacacgttgtacttttcatcaccgctgccgtccaaagttcgagtgtggggttggctgggtctgcgggaggaagtgaacagggctttattcagtgggtggttgtgtttgatttcaatagaaggacgatccatgctgttttctcttactactttctctttttctggtatgtggtctgtttgagtatcaatcccagatatggagagcttcgctggaatgctgtcgtttccgtgtcagaggtccagaaaatctgtctgctcttcttcctctgtccaacttacggtcttgggtgttcggaatgctcgtttattctagcttgacaattctatatcatatggttcaaatttgactttccttttacattattgtagtgttttaggatagccgagatcaaagcacccatagtacctaggtatgtggccaataactctatcaaagcatgacatgaatagactgcttccgcgtgacccatgtttttctgtatcttgagctctatataagcccctatacacaagcacatttataaggtgtcgaaaatatcaaatatacagggtatactcattgtgtccttctagttgtcatcgctaagcaacgtcccgaagacatcgcctctgtcggtatacacccatgcactagaatccctcggctctgcaaaaccctaggaagtactagccactggatatccctacgtgatgatttctttgggccctccattttccattctccttcgataacctcttcatccctttcttggcaggcgagactttacagctggctctggggccatggccgataagagtcgccactactcacatgctaagctcagatacgacgtatagtaaggctatgatatatattcacgtaaaacacgaaactagcaacagatagcaggtttcaaccatcctacacaaggtctccgcttatgcaacacaaggacattatagaactatgaaatgtcactatagaacagcaccagcagctacccgaagacaccatatgcgttctggtgttaggcaaacataatatgtacgaacctggttatttttggttacgacttgtttcaattcgagcttcgcaggctgaaatatatcaggatatatagtcacaggttccaatgtccattaatttgtcagcatgtagtctcggacacctggatcgacattggaaccttgaaacctcggctatcgataagcattttaagcatccccgcacgccccgactttcatcaaaaggcaatttatttttttgatatctgccaatattcatccaacataatgtccaaggcgatttacatatccccaattgacggcaagcctggcaagccaggccaagtctactacccgctctccctgcgcaccgtgcccaagccttccccgcaagggggtgagctactggtgaaactgaccgccgcggcgctcaaccatcgcgatctcttcctccgccaacacctctaccccggcgtgactttcgatgtacctttgctcgcagacggagtcggtactgttgtcggtactggcccgaatgtcccaggcccagaacaatggcaaggcaagcgggtaatcttgaaccccggtgttggttggaaggattcgcctgatggaccggaagaccctgctggataccggattatgggaggcaccaaagtttatgataaggggacattgcaggaatatatcagtattgagtactcggaggtcgaggaggcccctgagcatctctctgacgctgaggctgcggctctacccctgacgggcttgacgggatggagagctttgattagcaaggctggtgagaagaactctggggatggtgctgctgtcttgattactggcatcggtggtggtgtggctctgatggtactgcggtttgctgttgccaggggtgcgcatgtctttgtgacgagctcgagccaggagaaaatacagaaggccgtcgagctaggtgcgaccggtggtatcagttataaagaagagggctgggaaaagaagctgttgggtatgctcccagctggaaagagaagcttcgatgccatcattgatggtgccggtggtgattctgttgagaaatccgtcaagttgctcaaggtgagtgccacaacgggacatatattcaattactggatgaaagtactcacatttccaggctggcggtgtcctctctgtctatggaatgactgtgtctcctaagatgccatttacgatgcctgctgtcctcaagaacatcgacgtccgcggttccacgatgggctcccgaaaggagttcaaggagatgattgagttcgtcaacgctaagaaaatccaccctgtcgtgtcacgagttctgcagaccgagttagatgacttgtccgcaatcgatgggctgttcgaggacatgaaaaagggcacgcagttcggtaaactggtgattgagttcggcaagtctgcgggcagcaagctgtgaacatattcttgctacgattcccatgaagttatatgcctgtatggctgtctataaacatatgatacatatcaattgagatattttgcagcaactacgagtgttcttcgttccttccccctgtgtcgcttcatttgacgcatcaccacatcacgacgtatttgcatatccagcataccatcgctacttttatcactcatactctcttattagaagcgcaatcgagtaacaaaatctcagatccgctcattatacaacgaattattccattcatttccgattccaccatgaactccaagagggaccgtatctcccgacgagtctctcactccgtttctcgaaatggccatgtgcctcttgtgtcggactctcgtcgtatcctagaagattcgtgggatgaaggtagttttcaggtattgtcatatcggggaaacatcgatctgtggaatacccagttggtactaacagtcagtacagtcctttgacgccactcactatgccctgcaaaccctcaacaaacacatcgaacgaagactcgcaaagctgcaagccaatacagtccgcctgaagcgtgagttgtggctgctccagcgacacatcaaagaattccgccatcctcttttcgaaaactgggaagccgacttgctcacccggcttatcgaggttgctcacgcgcatcagcataagaagctaccaggcggcgttgtgatcggagagtcctcgtttgccgaacgagaaaatctcaaccatgcatacagcatcgcggcgaagggaatccgcatgccgactcttcgtaagcttggtctgtcggagaagtatcatcaggctctacagcgatattcagaggtgagtactcgctgtggtcttgatgtaacatagcttggcctagccccggtctaatatgaatcaggtcgctccttatcgaagtccgaatcccttccagaccgagttcgcattcgccaaatggctggtcgaggtgcgggaagacagaccagaactgtatgcattttggtccaagcttttccccgtctgctacgaccgcaccgtccaagaaagcgcctccatcttctagaggattccaaaaatcacttcaccgtcctgtcccgtcacgttttctatctttggctgttctgcggtcaaagcatccatagagaggttgttcagtggatacaatattgcttcgttgtttagagatgttctatttctagaagtttgtgggtcgttgctttggtgtgccgacctcgttctgccccgtgcggttgtgatcatcgtgtctcatctcagctttccacactttccacatagataccaagtctattcttatcgatggcttgtcggaatgcaacgcctgcctttttggtcctatgctcccgatgcatggtatgattttaagaaatagccctaatcgttccacgagctagtagatgatgtcttagcctccttcgacgatcgacggcgtacacacgacctttcagagaacaaactaccaccgttgcatccaatcctagaccacataaccaccacacctgggcagctagtacggtgtacaccggtcactctacaagaaagtccacaaaccaaacaatctaaacgtcaaccgcgctaaccactccggtgcgtctggcacctcctcctcccgtcattctgatcaaacagttggacgatccaaccgtcaaacaatcaatattaaaagcgatatgcaatatgaaacgaactcccacgtgcgcgacctcgaaaaccctattccagcaatcgtgccgcatggagcatgaggcaatccatgccgaattccgtcaccagtagcaataacacgataatgttttccgctcgctaataatagctccttttttttacggagtactatactaagctcgatgctaaaatgctaagtgcgaactaaaaagtgagacagccctaaagcggtatgtatattccgccatgcttccttagcgaggctagcgcaacgctcgcagtaacagattgatcaacctcttggaccgcttttcagggtctatcagctccccccgattcggatatgttccgaagggtcctgttaaagttttgatgggttaggattactagtcttcttttttatgggttgagagcgtttttcgacatgggtatataggctttgacctgtacgttccaaggttattccgacgttcttccggtcgcgttgctactgtgccctttagcttgctatgatctcacacaacatactccgtactttgtacggaggagatatgttcattttgactacgtatggataatttgggacagatcactatgctggtctattttttattttgtgcccttttttatccaatccagtggatacacgtcagtggagcgatgaagtaataagatagagacttgttcacgtctatatccaatataaaaatgtaccaaccttccaaggtcggtggaatgcagtatattacataatgtaccgtgggcacctgggcagccacatggagccccagagaaccttggaatgtggctaccaagataggtagattagccttagcaaaggttaatggctcttaagcgcagacgttatacctacactggcatactatcgtcagataaaattgctgcctagcttggcatttacttgatctgtacgtacagaacgtcaatccacgttttctgatcaagtggagacagcgcaacatggaaagaaaagtggaaagcaatggataaacccatagaccgtgcactttacttccaaggttaagttgtaactgagctatctgagtagcgccggatctgacataaccaaatatgtacctaggtagcgtcttgggactaccaaagggagtgagtgattggctcgagctatcaagatgtgaagcagcaaactcaattcgatattgttttggactgagggtcctgccaaaattaatcccaggtagtactgctaaaattgctaaaaggtcgaaaggtcgaaacctcgggggaaccttggaatggacccgagatcccggccaggttaaaattctatgcatctttacatgctctggttggttgaactaggaaattctccactttcacggagatatttctactatgtatatgatatgccgatactagatacgcagtatagtagtctacatatgaccccgatagcgtctacgttatatacgatttggttccttttcgatccttggcttatatttaggttcagacattaacataagcgcatacgtatatcgaagtataaataaagtgtttctcataggggcatgatcgttcgtcggttccatcaacctgaaactgtacttcgacttcgatggtgacgatccatgaattgacgggggtgttcgcgtcgatcctttttggtgggaattgttacaatagcgtttagcgcggtggattgatccagtggttttttttcccatgtggtgttgtgtacggagtagtgcggtggtgatatatacattgctctacaatacaaccaacatatattttacctctacgccaaccaatttgtgccagcctcttcatttagaaaaacttaaaacaatactaagagaaattgtacgtaccccgtactccgtaagaagtactattattccaattcaaaagagaaatgtagtgtcgcaaatattaaaaagctataacctcgcctcccatatctacccgaccccgcctaagcttctaccaattggatcgccacggggatctttgttgcagcccctgactcgtctatatcacctgaaaagttccacgttagaagatcggccacttccttcagaagctaaatgaatgttaatattacaatctttttacctaacgaagctcgatacggagccaaaatcacgaaaaaaagaagaaaagcaaaactcaaaggacacgggatctcgcatcaaatccacatcagctaagatctacacttaaagcgcccccagataaaggtacctcccatattccctacaatcgatacgcaatgaacacgagcaacgagaataagccaagtgggtacaagatcaacagtgttagcgtggcgcagtctcttccctagtgatgcgactataaatgaaaaacgaggttaacggtttcaggtacggaactaaaagttggttccggcaccgtcagtacggctaatatgccagcgggatttgtccacgctatcctctaatctctaatccgtagcaggcttgatataattatgatgacaatgaaacaccagtggagaaacaatatgagctcgcatggacttgcggtcaagactgacaacagggatcaggctcacctttgagatcgggatttgtcacggtagatttttgcacccaggtagacaaagagacagagagtcggctaacatacctctccatatggatcaccaatgcttcttcccgtagcatctgaatcgagcccactcatcttgagctcgtatgtctcagtgtggagggaagaattggaaggactgccaagcgtgtcttagttatcaacttccgcgggctctttaggatagtcgtgagacgctaagtatattaggggaaagcgcggaaccccattatcgctcagttcgtggaagcgcgggcggtatggatacattgtagactccgtattccatttgtactccgtatggagtgtgtgttcttctcataaccacgtttctcttgagtaagtgccaagaacagttaaagctagcaatgacggttcccaccgtgatataattctctgcctgtgagtggccatcgaggatggcgctaatggcgaggattcatgcctccctctggatgcctccctctgggattaaaggatcgtcgacgaatggggctaccctgtgggagaagatcttcgttgcagggggcgaaaaagaaaagaaagggtccttgaagacatgcagctgattctgagtcgtgattcgcgatctttggtcaaccattcgtcatggcgagatagacacccgattgcactctgtcgtccagctgcacctgggtacgatagacgatcccaacactgcaagacgggtccttcaaatctcttcacttagattaaagatacccaactccgatagtatttttcttttcaaaggagatgtagatgtactccttaggtgagcaagtcgaaccacccaagacccaaagcgggtccacgtcacattcctccgagctgtcgtgcagactaaaccttgatgtgaacaagggtaagccagtgaccttccacccaacaacgacatcggttaaaaaaaaattcgaggatcgttgccgtttgtctcccccttcgtgaacaggaccaggaggagctgaaataaaatgtaagggtggtgaacccaggcaaaaagagagagccatcaatgtctctgacgatgtttcactccgagggtttgtttccttccctaaggtccgcgcaccaatccccatcccactatgcagcaaggttgacatcttcttgttctcccttggacttcgccctcgaaaggattgacgataaagacgaagatccttacccaataatccaataatcctccttaacccgtgctcgggatgcactgttgcccccccacacacgcaagacagaacagacacatacaggcacgagtggcgccatcacgtacataatattgacggatagggagtagacacacaggcaatagtgcaattgtacctgcatattgcaaatgttagatccctagaaagggtaagatcgtagagctaacctgcaaccctttactccgtaactggtacggagtaggtagacaagggactagggttgaacgtcgatccaaagcatgggtaacatgtcgttcgcacgaaataatctaaaaaaacatttaattaacgtttagtaggcgcgggggttttgccaataggcagaaggataaacggtaaaagatactccgtactccgtacataaaaccaggaaccggagagcccgaagcccttggtggggtactgaccccgttcaatagtgtaccatgatgggagttggattggaccccctgccaatagtattgtcgagtacagtattgacggcttcaaacaaggttgcaagtccgaagtcctggggaatatgatgatccacctttttctttggaagcttcgaaggatgtggaaggtcccttgacaaaattgaaaattattcgcagcttgaaacactagttaggagatggagttgatcaatgggggttaacagctgcgtttttttgggaatattatttaatttttgtagctttttcatcggggtttttcctttttgggagttcggggggttgggtttttgatgtggggacgggcattactcccgaagattggccgattatatgcaaacgccaattgggatttccttggggaaatgtttcccgttacaaactaataagattatctggttttccaaatattctaaagggataaatgggatttcatatagattggacccttggattagatgctccttactccgtactctgttagatagtatagtttaattttcagggtggttgggtgggtggttgggagttaaggaacatgaacattgacattgacacatttagattgacctgcatgtagggaaaattattaactatctcctaacgaatggcaaggaagaaggaaggcatcaaacaataatctatcaaaccaaaattgtctgaagaagccgttttggaccgttttggactcgatcgcggatccgattgaagcttcttggggagattgctgatcattgcgctccactgtgcattgtacggttccgacgccctattactcaatttcgagagctgacttgactattttggttcggttcacaaatagtataccctaaaaactgctcatagtgtccacacctgtacgaagtacatatatcgtacaccgtactccgtacctcggaacgtcttcaacgtggcaaaatcgcggagtcaaagtcccttatcgatagcagagcgctttgataaatactttttaatcccccccttttatccctttgctacatcgtgggtggctggagctgcacgaaataatactcgggaattgtgcatccgaaccgttaatgtttcctgtttggtttagcgtgttttttgtttttctcttatttttattttcataattctttttttatgaaggagtcaaggatatctacatcaagaaataaacttctttccaataatgcttcccgaatatcttgaacccttgtactccgtacggagtagctatgatctcatagcggacctttgaaaaaaacgtatacaagaattgctgaaagaaacccttacggacattttggattctattttcgacatgtgcgtctgcgtctgcgcctgcatctgcatctgcgtctgtaacaataacatggttgacgttcttacggaactgcagaccttgacgcgctgcgtcgggtaattttcttgtagaacaataatgatctcctgcgcattggggatttgcacgatcaacagggcctggggagcccatggcccgggagccgttggaatatgaattgcgtccatgtagtacatgaccaggcgtagtgcatgtccgcctaatggattataatcaccaacctgcatctacatagatatgtagtcatatttcgtatgctgatagcgaatatggatatgatctaaatatatacggaagttaagatggataaggtgacagtgcagagtgccccagctgatggaacggtcctgttacctcgagggagcacggatgctcgggctcaaagtgatacccgatcgggtctagaggggtggacaggagggccagaagagccaatcacaggacaggacccttgcatagtcaggccaccgagtcacctgaaaatgcaaggtgtgctaaacttagacccttcgtgtttggtttttctttttctttttttttttttctggaaatctgagcttcggtttccaaggttggcccttcgtactcgtttatttactttcgattcgattctgttcgggtccgatgacggcaagcttaagagagtttccaagattggccaatacattcggaaatagttttggctttgccgatcaggaaatatctggggatttactttcaatcagctgtggtacggggagtcttatggagtacacatcatgctccgtatatgtacatcagcctcgtgtcgggtcggggaaaggaaaatgtgaattatcaaattgaccggcatgacgacacgatgtgtatgtactccgtacgatcatgaccctatgtacggagtacggagtagggaagatcgtaagtggagcgagcatctggagaaaaagagcgaagggtcttgttttgccagtttggttcggcacggatgacccaagggtcggcgtaaggagccgctgacaaagggatcaacttcagatcgtatcactgtatgttgtacaatataaggaaaaagtgtcattgggttaaaaaaaggatcagaaagggttccgaacttgaatggaaaagtacccgaagctgatgtaggggagctaaatataccaaagaaaaagaaaaaggaaaaaaaaaaaaaagaaaaacataacagggttgccggtgaagctttctgattggcagggataatagtaggagaggagcccttcggagagagtcctcgttatagacacaatccctgattggatggaccttgaccttgtcaacatggatctcgttcagggttacagtactctacgccccttttgggggggaaaaaaaggaaaaagaaaacaatgaaagaggctatgcttgtcaagtcacctggggaagaaccagcacatacacaaacagcgcacaaaggtaaccatcgggctgaattctatatggaaataaggcgattcttgttctgcagacataaaatatctttttcttttttttttctgccttccacatgctggatgattccccacttttctttcttttgctagcggcgcaggtcgccagattggtgtttatcccgagaaccgcaccacgttcctttttctgtccccgatgttatgcgcagatattctcatttttggttacctgttccaaggttcttgaaatagaaggttagaaatgtagtcaagaagatatttttgttaacatcttattaacatcatactatctaaggaaaaaaaggatataggataggtggatctgactggtcggacacctcgaaaagcataacaagtcggcttctagtggcttccgacacactggttaactcgtttgtaaatgtctccctttatgatatcgagactcgagactcgaagataattatatagattgtgtgaccatggtaaagaatcaaggagtacctacataagtacttgatacaatataaccttggttatcttattgtatctatgtcataggtaataatacccaaaatacccaattgatgccaagttgaccccctctgtgcatcccccgccaggatttcccactagtcttttagtccgactactttgagagatcaatttaattgaatttattattattattcataattaaaaaatatcataaaaaatatgataaaatatgataaaaaaaaataatatactataatataatatacaaacccaaaaaaagttctccccccacagggccttatacagtttaggtcgtaaattgtactcttgacctgctctcttctgactgctaataataatactccatagaatcctcaatgcttttaaccctgctggtcccatcttccttgcatcccactttccatcccccttggaaatttattatgactttctaagtcacacattcgctcaccacgttcgctcttacgctcgcttacctgctgctacgagaaccacgttcgctacgtttattggaattataactcgccctttaatctttaattctttttttcttttccttgctgaaaccctggaatattcgccaattctattttatattcgaaacgatttggtggaagggtcgataaagtgtcatttgccccgacactgcgtttgcgcgatatctctgtagatcccgtttgctccgcggtctcagttgaacctccaaccttttgcgcaaaagggaaaaaagggaaaggaaaaaaaaggattctcttcgggcttttgtacttgcgacaggctatactacccgggtactggatactggatattggacacaactggattacagaaattcaaccattcgctttcttgtctcggaagacactccggaattctagtggaatcgcctccgtttggaaaggtctcagagtcattagggaatattggatacaggaaaggaaccattcaggcagatcggttcatcagcttaaggttagtatcaatgtgcacccctccctttgcccacggtctcacttgttcccctcgtgccttgcatacttcctctttcggttcttgatctttcgtgttatgctccttgcaggaatttgtattctctggagtataccaacgactggaaatgacgatagttgtcaaagccgtcggatagcttccccgtcccgctattgtccagtgtttgttgacattagtctcttcttcaggtttaacgagactcggatcttgcatattatcttggaaggtcaacagccagaacttggtctcagaccagaaccttttccattttcactttccatctcggtgagttcattcccccctatgcaccgatccggttcccatagtctgaaaacgttctcgtatactcattatttgagtagcctatcatctggaatcttgttcattgtggcccaatctgcttgacgctttcccgaaacacctcgcggatcaaggaaataaagaaaagcgaaacctctccagtccacgctcgttgctcgccatctcaaccaatctcggcccttcccgtcacaattggcggtggacattgaacatctactaagcgactagttcttctgcttctctttatgaacctttgggcactacggtcgagatttgagtctattcctgcagccaaccgttcctagtttcagccttagtggtttattcctggatggtgattcgaggccttttgttgccgccatttttgtgagaccaacagcaggttcgtcttgtcgctcgttctgtctcggagagcactccattcttgctcgtgcttttcgaccctacaatcgtttggaataaattcccagtcattcgcttcagaaggttctgtcttgttgcacttgttgcaacatcttcaagctggcttactcgaagacacacggtgttttggtaagattcccaccccagatttggatttgtctctctcttcccttgtggatgcccgcatgttttgcataggtgttccaatcccagcccagcatcttgtttgaatcttctcaacccttgctctattgcctttttttttttctgtgtgcacaagaaaccttcccgctgacctgtctctccttgttccgtcacagttcgacccagattttcaaacgcctctaatactcggcgagtcgttggatctgtcggactcagaagaatcacagtttgtcggtgcattttcagacggcctgtgggccaagtctgagcccatcctgtccatgtctgctttccagaagcccgttgccggcgccatactaggtacgttgcatttgaagaactttggtttgctatgatttgggaacgtcccgtgtgctgagaccaaacgcagattacggttccactcggtctttgcatgatgctgcttcttactcgaactacggtcaatcaccttatgtgacgaccccgatggttccctcgcccatggccgccgatcaggcgagtcagatctcggattgtgttccgtatctgcccaacgagtatgctagctcgtacgaggagtctcagtcgcccatgttgggcgcacgccaccgtcagctacccgaaattgtgacatacagccctcagcgcggaagtgaaggaactagggtgatggtccagatccagtgcccctatgacctccacgcttcttcatacgcagctttgtatgttgttttcggctcaaagaagtgtgaatcgctcccgcatttccttggattccagggctccgcgttccagtacggtctttcggctgatgtacctccattcttgtctactggatccccatcttttgctgttcctctgtccgtcttaatggagacccaggatgactctcccgccacctcgcttcaggttggtgtgtacacttatgagcaagctgcccacccttcgccatcagcggattcccgcaagagaaagttctcctcatattccgatgttcctgcggcacctgctaagcgacacaacggatccgtgatccccaaggttgagcaccacgacggctaccacagtcgctctgtgtctgcgtcttactcgccttacttgcagccacttcccgccatggctgggttcgtcgcaccataccacgctgcatcctctccccagacaggctctggccaatactcctcttctgccacccctcagcccgccctccgtgttccttcccctatcaccccagcttggagcccctctttcgtctctgtgagcaatgatggtcgcaactctggtctcgccttaacgcatggtgtcgctcagcacaaaggtcccacccagcgtggttcttcaaatcccactttgatccgcacctccaccatacaaacgcacagcatgccccacaacccagccttcaacccttatgccatgtatcccaccaaggctgtcctcaagctcaacggtgatctcgacagcatgacacaaggctggtcgaaggaagaacgcacgtcccaacgccgcctggtgcaattcacccgttctcaaactggtagcaccatcctgggcgagttcaaggctgttacccccgaggatcgcgctccaagcagtatttgcatcagctgcattttgtgggaggagaagaatgagtgctacgtgaccagcgtggacaccatttatttgcttgagtccctcgtggccgtgcgcttcactgtcgaagagaagaatcgtattcgtcgcaacttggagggcttccgccccctgaccgtctccaaggccaaggtcgacagcgaagagttcttcaaggtgatcatgggcttccctgcccctaagccacgcaacatcgagaaggatgtcaaggtcttcccctggaaggtcctgagccacgcactcaagaagatcattgggaaatacgtatgttcttgaattccacagctcatcgtgacgagttactaatatttgtcttttctctagtctgccagctattcctcaaccgccggtgctctccccacaccaatgaccaccacctacaccagccatgccagccatcccagccttggcactggttctgattccggtaccgagcctcacactgccaactccccccagtccatctccgacgctggtgctagcaacacctacactggtatgcccgtccagacctactcgcaggcagatcactccgcctcccacatgtcttcggctcctgagctccggtccatgaccgcagcctcccagccctatacatctgttggagcatactcgtacccggccatgtgccacccccagagtgccaacggtctgccagctacagccccgcgagcttcttgggacatgcagcctctcggccccaacgctcctcacactggcgcacccggaaatggcacatgctacacatacctggatcccgtgtactcgatgcacgattcggcccacggcggccactgatccccttacctggctggtccttctatctgatctcttgctgcgttttctttccattctatttttcatactttcccctccgccttttttgaagatacgattttccttttctcgtcactccttaccaagcccagacagcgggttgccagcccatcggacacaaggtctcttctcacctggaaaggtagcgagagcccttgtatccgctggaacctcgcatcccacacattgatcatgatttatgtccctccttacactacaacatcataatgcctgatgccctcaccatacacccaaacttgcgaccatttgcatatctgctttttgacttttttttgacttttggaactttgtttcactttgagacctgttcctcgcatttagacggtgtcttgttcattccttccttgggtgcatatcttacatgccgggcattgcggcttccactccttttttgagcacaaaacatacattctgggcttttgtactactattcagcatagcgggcgcttgcttgtcattccttttgcatttgcgggttattttcggattggaaatgggatagacttggggtttgttttattggaatcttggcggtcttgtccattttatccaattccttggtgcattttggacggggttcttgggcaaggatttctggcacaatggacttgtcttcatgttccgggtcttcctgctctggtccctgtctacttttcacttctctgtttgaaagtttggctcggagttcattcggtacttactacttcttgttatttcagctgagggttgttgtcacttactacctactgcattgttccggcgtttgggacttgaacggttggaccgtttattaccctacttttctgccataatattacttattctgggtcacagttgttgtactgcaaatcgacagattacttcctcttgaatcattcttaatcacccttgtcttgtgtattatgtagcgatgaaatgactcgatgagtgatgtaaataatatcacgtgagaacaccaaccctacacccatgtctcgtagatacgataaggtcaagtgacttactatcttatcaacacgtgacctgcggggcccagcgaagccggcctcgaaaaagccctggagagcaattgcatttgagtcatacagatcgtttgctcttttataacatcatcttgccccagtcctgacataacaattcacgtttgattcatcccaactttgcacatatatatagggactgtttgccttccattgacctcttctctttcttcttatcaccaccctctcttgccccgccactgtcacatcgcctttcattcataatggaagctatcaagcagactttcgccaagtgcaaggagcagaagcgcgcggcccttgtggcatacattactgcaggataccccactgttgaggaggcagttgatatcctccttggtctcgagaacggcggagccggtaattcaaccccaagtgaaagttgctcacagagatgatctttactgacattcgatctcacttcacagatatcatcgagcttggaatcccctttacagaccccatcgctgatggtcccactattcagaccgctaacacaaaggcgcttcagaatggtgtcaccctcactactgtgcttgagcttgtccgcactgcccgcagccgcggtctgcagactcctttgatgctcatgggttacttcaaccccgtccttaagtatggtgaggagcgtatgctccgtgactgcaaggaggctggtgtcaatggcttcatcatggttgacttgcccccggaggaggctgtccgtttccgcgacctctgctcgagcgctgggtgagtttgtctatttttacttattttcacatctttatcgcttgtctatggttatccagcatgcttattcccatttcagtctctcatacatcccgcttatcgcccctgctacctccgatgcccgcatgcgtctcctctgcaagatcgcagacagctttatctacgttgtttcccgcatgggcgtgaccggtgccaccggctcattgagcgcaaacattcccgagcttttgaaccgcgtccacgaatattcaggcaatgtccctgctgcattgggattcggtgtcagcacccgtgagcacttcctgtccgtccaggagcaggccgagggtgtggtcattggcagccagattatcacttgcgttggcaaggcccctgctggccaggctgccaaggctgccgaagagtacctctccagcattaccggacgtaaacgtgagcgtgatgccaccggtgcctttacccgcgagatcaacgtccttgaggccgttgagaaggccctgccttctagtcaggtccagccgactaaggtcatcaccgatgccgatacccccgccggacctggtcttgctgaccagattgaggccctcaacgtcacaaaggatgcatcttcccagccctcgcgcttcggtgagttcggtggacagtatgtccccgagtcccttatggattgcttgagtgagctcgagcgcggctttgatgtcgccaacaacgaccccaagttctgggaagaattccgctcatactacccctacatgggccgccctagcagccttcacttggcccagcgtttgacagagcacgttggcggcgccaacatctggttgaagcgtgaggacctgaaccatactggtagccacaaaatcaacaatgctcttggacagattttgattgcccgtcgcctgggcaagacccgcatcattgccgagaccggtgctggccagcacggtgttgctactgccacagtttgcgccaagtttggcatgaagtgtaccgtcttcatgggtgccgaggatgtgcgtcgccagggtctcaatgtcttccgcatgaagctccttggtgcttccgttgttgctgtcgaggctggaagccgcaccctccgtgatgcagtcaacgaggctctccgcgcctgggtcgtcgaacttgataccacccactacatcattggctctgctattggcccccacccgttcccgaccatcgtccgtactttccagtctgtcattggaaacgagaccaaggagcaaatgcaggcacagattggcaagctccccgatgctgtcatcgcctgtgttggcggcggtagcaacgcagtcggaatgttccaccccttctccaacgatcccagtgtgaagctcatcggtgttgaggctgcgggagacggcgttgataccaaccgccactctgccaccctctctggtggttcccacggcgtcctccacggtgtccggacatacgtcctgcagaacgagcacggtcagatctccgacacccactcgatctctgctggtctggattaccccggtgtcggccccgagctgagcaactggaaggattccaaccgcgccactttcattgcggccgacgatagccaggcccttgctggattccgtgccctcgcccaacacgagggtatcatccccgctctggagtcctcgcacgccgtctggggcgttatgcaaattgctaagaccatggagaagggccagaatattgtcctcaacttgagtggtcgcggcgacaaggatgtccagcaggttgccgacgagctgccccgtctggggcccaagatcgactgggatctgcgcttctaagcgcttcaagcatcatttctatgctctttcatccggatgagatttcccgcgtccatttctttctggggtttttttttttccttctttttttcttttcggtcctctggcgagacggaggtttcatgatcccttgatgcattgcgggatggtcatgaaaaagcgttactattgcagtcttttctttcccttgatttgggagttatttttttttttttggataaaactagaaaacggaaaaaaagagatattgatatcccctttacagtctttttgtttttcatctttttggactgtcttcataaacatagatagctttaggctaggagaacaatgacagcctatcatctaccatctacaagaccactcactatccgcacaagatcgacgtacaaaccggccatcccataattttatagagagcacaaatagcccgtgaaatagattcgataatgtatcatgcttgagcaagaagaaaccaaaagaaaaacaaccaagaaacatacgaacggccgcacaacaagaacaaaagataggagtatatgcaattgacatagaacaaaacgggacctactaatccctcgccaggacgctggcgttccacttctacctcgcaccaaaagatagaatccccggcgatagtttacttgaacatagcacaagactcgggattcacctcatacagcaccacatcacgcgtcgatcaggttctcacccgagttatcgcgggtatccttgttagggatcttgcgggcatggcgggcgtagaactcgtcgagagtgcgcttggggacacggttgaggagttccttggggtagatgcggagaaggttccaggcgatgtcgagggattcttggatggtgcgcgactcgtagggagactggctgatgaaggtgcgctcgaacttctcgaggaattcgagggagagcttgtcttccgaggagagggcttcctctccgacgacggctttcatggcggctgtttggggtggttagaggtgttcatgtgatttgggaggatggaacaatgtaacgcggtgttctttggggtgggttgcttaccggcatcacgaccaatggcgtacttggcgtacagctggttggacacatctccgtggtccttgcgggtgcggccctcgccgatggcggacttcatcagacgtgatagagagggcaggacgttgattggtgggtagataccgcggttgtcgagctgacggtcaatgaagatctgaccctcggtaatgtaaccagtcaagtcgggaatggggtgggtgatatctgcgtgggtatggtttagtggggttcagcctgaggggtggactgggcaacgcaccgtcgttaggcatggtcagaatgggaatctgtgtaatagaaccattacggccctcgactcgtccagcacgctcgtaaagggtggacaaatctgtgtacatgtaaccgggataaccacgacgaccggggacttcttctctggcagcggaaacttcgcgcagagcatcacagtaggccgacaagtcagtcatgatggtcaggacgtgcttctcgagctggtaggcgtagtattcggcggtggtcagggcaagacgaggagtaatgatacgctcaatagtagggtcgttggccaagttcaggaacagagtgacacgctccatactaccgttctcctcgaagtcgcgcttgaagaaacgggcagtctccatgttgacacccatggcggcgaagacgatagagaagttctcctcgtggccgtcgtgaacatccttggtgggcttagccaaacttgcttggcgacagatctgcgcggcgatctcgttatgtggcagaccggcagcggagaagatggggatcttctgtccacgggcaatggagttcatcgtatcgatagcggagataccggtggaaatcatttcctcggggtacaccttgtccattcgttagcttcccgtagtcccatctcatatcggtggcagtgcgcatactcgggagtaggggttgatgggctggccgttgatatccaagtaatcctccgccaacaccttgggacccttatcgatagctcgtcctgaaccgtcgaatgttcgacccaacatgtcctcggagacgccaagcttcaagctgtggccgctgaactcgactttggtctgagcgatctgtcagcacatccgatattcaaatcattaccgcgagtaattgtaccttcttcacatcgatgccggaagtgccttcgaacacctaacgagctacattaatgtcttgcatattaggggcgaggttatattccgcacctgcacaacagcgcggtttcctatttgtatacatagcaagtcagctttcatactcctaaataaacggcagaatgtggggaacggacctctggcttccagtacttgaccactgcgctctgagccatcggggagcgtcaaggaaacgatctcgttataacgggggaacttgatctgtttgagaatgttatcattagcatataattcccactatattgtcagagcatcatatgccaactcacattatcgaggataaccagcggtccgttgatgcctccgatggtattgtagcggaatcggggcttgatggaggacatccgggggtcaataaagtcggccatggcgaatctgatcctccacgggcgaaattcagagtagaaaaaggcaaggatgggggaagagagcaaaggtgggactgggggggttggtccagctgtctcgatggggagcttgggcggtgacgttgcacgtgatgaggtccaagattgcgtagacctggtcttcatttcttggcgtttgctcctccgggctttttatattgcacgttatactacagttcttggtgtatttggattattttcgatgattcacattattcctactaggaacacaaataatggaatggcggcagccagacaaaatctgacagggatatcagcagatcgaacgctagcagaagcgctgctctttcgtccgcggcgtggtcgcagtgaagaccccaacagcaggcagttcactagatctgctactgggagtcatatccacagattctgtacccggaacacccacatcgccaagcagcgcagcatcaggagcagcccgggtactaccgaagcgcagaccactgcccttcactttcataatggacaccattaatgataacccctctcgggttgaagcatataagcccgaggcatatttttgattaccataaaatattcggagtagttacattagaaatgaaacaatgatctatgaatttatccattttctatgcacatatgtattgtatgaagcccagcggagggcggacatgttttgttcaaggtgtcatgcatattagaggccaatactaagcaattaaggtaggtaagtaagattgctgacgacgagcaataataacacggaagacccgatcaaaaaagacagttgaaccaggagagaagaaactcatagtaataatgtgagatgctaagcccatcaaaagcagggtatccatacgcgtgaaatagagacagcgataatccttctaacgaaccattcaaacgcagtgcaagataggcgcctcaccatgatccgatccatgaaaatgcaaaacagaaataaacacaaagaaagagagtggatcagtccactttagcttgagcaaggctctttggggtaactagattattggataggcggacatttgcagtgcccttgagcttgtctttccacgtatgcctcttcaactttcggcgtgcaaccattaccggcacagaggaactagaaagaagatagttggagaacgatccgagaaggacactgaaggtaaggtcagtattgtctcctgcagcacgataaataaattcaagtgttactcaccccttcagtgcactctgaccccgggcgcccacaataacgagtgtgggctcaagttcatcaatctaaaagtcattataagtatggatcagagattataaggaggtcgagagcagacgaaacacttacagcttcagtgatcatagacttcgggttcttgcagtgtatcacctccacggcaatacggacctgcaagaccgttttccgcagcagcttcacacaggtctgagacacagtctcaactgccctcactcgttccgcctcagctatcgacgatgcccgggaatcagcagaatgcgtcttgctggcagtaccagggccaagtcgaccgagtattgtacgggacccataattctggttagcttctttcgtctgggtgccaacgacagccgttgcatctttcatcaccttggctccctcgccgacctgcacccctgacgcagtagtggagtcctcgtgcatggcgtagatggcgaaaatcgtgtctccatctctcagaaccgtcccgatggtccattcaagggcatagacggactcttcactcaagtcagttgcgatcaaatatttccgacggcgacggcggatcccatcgccttgatcctgcgggcttgaaaagttcccgcggacaattgttcggatggaacggttgtgaacaccattatcaatagctgacatggaaatgctaagcttctgggcacgatgaatgtcaccgatctcggcttcatcctctgagccgtaaggtgtgccagccactgactgaacacgcggggtggggatgtcgaaactggtctgtggatgaaccacagctttcaaagcagatttccgcggtttcttctcctgtcgtccacttggaacattgggggctttttctatataatgtggtattagtatgctggattccccatttaacagaagtcccgagaaggaaggcaacgtacgttcttcggcctgcttgaaattgtcatccttggatttctcaaagtcgcttggcgttatagatgtgatatccgagtccttctttttcttgcggcctcgtacaccctccagggtgctgtcttcgtcgctcgaagtatcgttggcttcatcttcactgctttcaatcatgttcttgtcgcgatcgaacacgtccttggctagtcgctcccctccctcttccacagctgtcggtttgatataatcaggcaggcttccatggggtttagccaatgcctcatctgacttgttgaatgcatcgtgcatgttgagcgacttccccttccctgaagtaataggggcaggcgtcaaggtttcaacgtgaacggaatgactgtcggaggaactggggcgaccacgctccggtgaagacgcagaacgggagtcgagagacgatccacgctgggaagatccccgtgatgagtctctgtctctgccacgggaaaagcttctcgggaagaggcggccagacattatggcagccacacccttgcggctctgggaccggtctcgagcctgcaaaaatcgctttttggcgtgcggctgctctagagaagtagaagcgactgcatcattgtcaacggtaaggcgacctgcggctgagctgacagtgtcaacgacctggtcggatgatctacgagggaaagcctcgcggtcggcggtgtgtctctctggcgaacttggggcagatgccatatctgacgaactaatgcgcaaaggcgatgatacgagtggctctggactgcggattccgcctgctctgggcgaataggttgtcccgctcgcactcttagattgctgaccaatctgcaggttctgcagtgcacggcttagactcggtttgtcagttattgatattgtagaccgaccatccaagcttttcagttcagtgggagaagttcgaccagtgtggtacgacatgacgacaccgcctccgggttgtggggaacttgagagtcgccgtgagcggagtggtggggccaacacgtgaacgagtctgccaaggtcgtcccgaagtcgttgtcggacgcgtgagaacgcagtcttacctctattggggccctccactgtttcggattcagcgctttcctcagagtaatctttcagttgctgcggaattgatacagcgctttgatgtggttgtgcgtagtagcgtagccttcaacgagttgacgtgtagcttgcgtgcgagctaaatgaccaatgggctccggtaagtaatacgcaaagcagcaatctgagatgactctctgaaagagctcaacgtttgaatacacgaccggctagccaagcagcgagggcagctactgtaacgactgaaaaggcttcagaccaagtgttgcccatttgttttgcgcagcgtaagttgttcttggtatgattaagggaaaaagaacacaaaggaaaaaccaaagacctatgtagatttggggaaggagcctaagttgaggcttcttactccagccacagtggctacatgtactataaattttacgctcggggcaatctacttcctacaacaatatcatacacgacgcttacgatagaaacaataccactaaaaaattacacgagaacactcgtcattgtatttcttgtcatatacatcaccccagtctcagtcacgatccggtctcggcattcaaagtgagtaaagacggttttacccggtcttagcccagacataatacacggtgtcagtcagttcggtaccggggccagcggaggatgccatagtccggataaatgcaagtgagagctgatggctatgggttgggttctcgacagtgagataccagagacctattgaaggaactagccgaagagccatcttaaaattggcccgtccacgcccgacgacggcattgggcaagaaaagaatggctgtagctaatttcttcaatccctgctcggctcgggggcatgaaaggatcgatatattggtaccaattcggacgtcgacagcattgtaggcgctccttgtggagttggttaagtgtagacacagacgctgacatcgtccaacccctgctgccgcatcacagcgtccatcttgattgtaggatgaaaatccgtatggatgcaggcgtgtcgcgggctgcggagtcctccttctttttcttctggatggggttgtggttagctacggcggcagcgggacctaatacttgcctttgtcgcggttcaggtaaatggttcccggtggaggatatctgatacgaccataacacatacccgtatatgaagattctgcggaatactcaccatttcaaatctgtcactagccctagaacgccttttggcaaagtccctgcgtcattgcagcatatcccgggtcgggtgcagttcacctagaactgctattttccttcgacctcattccaatcgccgaactgcaaccctggaacaaggaatacgctagaaaggcccgctcgggcgtaagtagggaggctagcggcagtattggtttcgaaacggccctctcgataaagtcggcgagtgattcgcgcgcggaggatggacctaataaggctgattgcggagcgaagcgaagcaatattagaccataaccccccaaaatcgtattccccgatatatatatatatatatatagagtaggatagtaatatcgctactaaaaccttcatctagatcttctagcgtctttttagaggcgactagtattctccggcggctagagtgacattcttagcggcggtaaatagcgtaaccgtgtcctcggaggaagtagacgtgaacttcgcggcgaaaagagggaggagaagcaggagggcgactctagcgaggtagagaacgacgtgtaggacaccacatagtgcggaaatttcgtaggtatctaggtatagttagtatcggaggatgtagcatatatatcggaggcttacttgctatcgcgggcgtaaacgcggccaccggacgtaaggggtagggcaagtgggccttagtaataactaggacgctgtgttagtacgtcttaaggcgtggggattacctcgaggcgagcagacaagtaggcgtagtagtagagataggcagtgggcgtataaagaagagaagaagaagaagaagaagaagaagggaagaaaaattgaatgtatagcgggtgggagagggcttgcacctacttcgctccgtatgactatctagaggcataaggcccccaaggtcactagtagaagttagtgtggcaagaacccttcccacctgccatataagggggatgtatgaagagaagtatcaggttaagtagccagatggagaagaggtgtagtgaaggagacaatgggggtttatgtagtcaggcaaacatggaaatgagaagtaaaggagagagagcaaacatagacctgaaaagcagattattagatgtccctctcttttcttctctctttctttctaatgtatcctgctttaccatttcacattgaaatcacttcttacatctccatatagcccattgataagattcatattctagaccccttcaatgttttcaattgattgaaaagaacttgatacctagtgtgtgcttgcaataccaattgatgccttgcactgcctgccctgtctgtcaccattattcaacgagacttatcgacgtttgtaggtaattcgaaacaagactcacgccttaaataaagacatctggagaagtcacccattggagaaattttgatatttcgacggataatggtttcttgggttggtcataatatcatatagtattctcaggttctagcagactacataggttgacactgagataaaagcctcagcgttacaaactaaaatcatggctggtatcccatggaattggcttgtagtactcacagtagtattggctgttataatctgtccaacctcttctatcaccttgccagttaacaacttaaaagccctaactggcctagtagaattgcagaagaattgccttcaactataagatgtgaaggtgcgcattgacatgtggagtgttgattctgttctaggaaaggatctaccatgaatgatagtgctataagatccccgaatgtaacctgctgtggcaagattcctttttcgttcattggaaatagtaatggtccatagcacgtctggatgatctgttggaacaaccaaaaatggattggctgacatgtaacaagagtaacatccaggtgtgctcgaatggtcccagaatatgcactgcagggtatactcatctcatgtatttataccttgtttatgcctggcaatgaagttcaatatttcaatatttcagctgccgaggtatgagattaatatacaatatacgcgaaagtgaagtggcaaagagccctcggtagtgagacacctcggaaaggaacatccgtttgaacgttgggaccaatcagagccttccatatgtaagccgttccagatcccgccagatcagtcagcccccaattttcccttcgggtccggcttttggtattgtgaactacatatctcctcgaattcacggggatttcttctattttgtttctcgttttctcaatttggctcaatttggctcaatataaccatggaggctctcttgcaacagtctcgcacgatgtgccctttcctcaagcgcacatcccccactaccctccgcactctgtcgaccgctactcgtcctagcccgggaggtggaaccatgtccaacctgcaagtcctgggtcgccgatgcccagtcatgagcaaggctctggctgtgcagagtgcccgtcttagtggcaccaagcgcttcacctcgcgcgccgccggagtcgctggatgccagtctctgcgtgttcccactggcaagcgggcgcttcacaccaccggtggtcaccccgctagtcttgcctctggagggtacgagaagaatgagcgaggtaaattgagtttgtgaagcttgggctttgagctgtttctaatctgactacaggaaaccctaacttggccaatccgctccgctcgtcccctaccgccgccggcgtcggcactgcagtccgcggtccccgcccggaagccccagccaacgaaaagttcaactatggtaacttctataacgcggaattggagaagaagcacaaggacaagtcctaccgctacttcaacaacatcaaccgtctcgccaacgagttccctcgggctcacactgcctcggccgaggagcgcgtgaccgtctggtgctcaaatgactacctgggcatgggtcgtaacccgcaggtcttggactccatgcacaagactttggacacctacggagccggtgcaggtggtactcgcaacatctcgggtcataaccagcatgctgtcgccctcgaggatacacttgccaagttgcatggtaaagaggccgcattggtattcagctcctgcttcgtggctaacgatgcgaccctgtcaacactgggcagcaaaatgcccgattgtgtcatcctctcggacagtctcaaccatgcctcgatgatccagggtatccgacactccggcgcaaagaaaatggtcttcaagcacaacgatttggaagaccttgaagccaaattggcctcattgccacttagtacccccaagattattgcctttgaatccgtatacagtatgtgcggatcaattgcgcccattgaaaagatttgtgatctctccgacaagtacggtgccatcaccttcttggatgaggtccatgccgtaggaatgtacggcccgcacggagctggcgttgctgagcacctcgattacgacgtctacgcatcgcaggatacagcttcccctcaaagcaccaagggcacagtccaggaccgaattgacatcatcaccggtaccttgggcaaagcctacggctgtgtcggtggatatatcgcaggctcggcagccatggtggataccatccgctcccttgctcctggtttcatcttcaccacttcgctcccaccagccaccatggctggtgcggataccgccatccagtaccagtcccagcaaccccgggaccgcatcctccaacaactccacacccgggcagtcaagaccgccctcagtgatttggacatccccgtcatccccaacccctcacacatcgtccccctcctggtcggtgatgccgagctggccaagcaggcctctgacaaacttctcgaggaacacggcatctacgtgcaggccatcaactaccccaccgttccccgcggcgaggagcgtctgcgcatcacccccaccccaggccacgtgaagccgctgcgcgagcacctcgtgcaagccgtgcaagccgtttggaacgacctaggcctcaagcgcaccagcgattggaagagccagggtggtttcgttggcgttggtgtcgaaggcgccgaggccgccaaccggcccatctgggaggacgcccagctgggtctgcaggctggcgagaccctcgagggcgctgttgctcgtgaatttaacgacgcagctgcccaggccgccgtgccgctcctgaaggctgctacccctttgaccgagaaggcttactcgggaatgaactccacccctgttggtgtggttgcgtagggcagacgaaccccgtctttacgcctctcggtctttaggggtaattctagttgcattattcccgtccactcattttctataatattctgtgcggacataacatatgcatccgtcaatcataccaccgcacatatttgtgtcatatctcctgtctgcttttgtctaaatgatgtagtcatcttccagcttgcattggccgtggataacgcttttgttgatgtatgccattgatttggttggcaagacaaagactaacgtcggatatactgattttgtatctatatcgatcgagtgtcatttattgggctcaagtggatcaggttagaatgaacagtgttgaagtggccgtttgctctctttgcatttcaaatatgtttcgatctttgtagcatgcaagtgctcattagtatgtaagtgacggcattcgcttgtgtatatatagggcattgatatatacacccgtgggtctgaaatgcctccactctatttgcaaagcagctgctatacgatatataacgccaatagaggtttacttctatagatcctacacatgtgccattaggcaaagaggctcggcccaagtcatagaaaaaaaaaaaaaggcaaacccagataaagaaacgaccaagtaaggtccaaagtccctttggctatgtaacaatgtctcattgatatagaaacaggtaaaagtaacaattttgaaacacagagcgccatatattccaaggacgtctaacaactcaagaccaccaaaccacaaatcaaccctacttccgaccaccacggctaaccttagggaactcaacaggcacacgcaaacgagcaacacgacgcgcatgtgcctccgcacgtccacccttaatattccacttggcgaactccgtctcacgcggcttatcaatgcgacaaccaagctcgcggaagtactggtgaatagtattcggatcgagacgcagatcatcccggagatcagaaggatccgtggcaagctcgttaggcgcattaccacccagcgagctggagcctccatcacgcgccggctggggcgggatatgcagcgagagggcacagatagtagtgtgcaggagggtaaagtcgttcttcgagacgtagccgccgctcggcgcgaagcgacgacgcacagcatcgatcacagactccgggagcaagtcggcggaagcggagtcggccgcagcaccgggcttgggcttcgtgacggcgccggtggtgtttgagaggatgcggcggaggtcttcgcggggtgggagacgcttgctgcctgggccgccgcccttggcgcttgcgccggcgtttttcagtgagcggccgaattcgatgagcagctggatgaagcggaggacttggaggtgggtttggttgtcggagttgacgactgcgccgacacggttcgagacgtagcgtgagacggttgttacgccgagaccggcttccacttgcgatttccactcgtccacgccgttcagttggctgagggttgagtggctgcctggaacgagggtctcgattgtgtagacatcggaggggtgcgagacagcgaggttcggcgttgggaggggcttggccgcttgcacttcggcctgcatggcgagcgccttggcgtggccggatgctgtgtctgcgggcagcgaggagatgagggctgcgccggcttgcgggacggcgccggcgggggcgttggagagttgggcgttctcggccatggattgcacggccttgcgggattgtttggttccgaaggtgttggtgagggctgtgcgttgggcgcgcatggtgttctgataatgcttgttagtttggtgctgctgatatatggaattgcggaggggaggacataccatctcttcgtctgagtcttcttcctcggacttgcggcttctcactgctcctcgtagtgtagctcgccgcacctccacgaccttccatgtcttgtgctctgggtctataactgcgacgtagtgcttcacgtgcgagtcggtatcgtctcctgtgccttcacggccgacaaaatccatcttggcgtggtccgaggactggagcagcatctctgaagagacaatgcccgggttccgagtcgctgccgcagatttggagacattggcgcggcttttgatatatgggttccagcggagggattttgagctctggagaccgggtgtgtcggctatagcgcagaaattcaattagagaaagttcccagtctgcataaaaagccttcaactcaccaattaccggtgccagctcgctcttatcttcaacaacgctggcggccagcgggggcagctggtgcagcgcaggctttttgcttggacgttcattgtccgatgagcgcttgcgcttttgatctgttttactggacggcattatggcgttaaagacgagagacaaaagatcgtagctctcgagatcggctttagcgcggtgaaataaaatgtctggacttgtctggcagaaaattttacgagcggagaccaggcaggcggtgagtattacggctttccacacaaagaaatattgacgtacatggagcgtcaagctgatctggtggcgatatccagaggactacgaatatttgaggatagatactcaagacggtagctacgctctaggttacaggattacatttacaagaagtaaaacaaaagtagcactcatcaagtcatcgattcatctgcagtagctaaacgaagacctccgagttattccatggatttttgataaactcccggaagaaacctctccacaacttttgaccagcccgaaggaaggccgtaaagataatgagaattgaccagtcaccccagtgccgtgctcaaagaccgatggtttgcaccggccctccaacatccacctaaacacaggagcctctccgagtaataaccatgcatgacatcagatcgtagacgtgaatgaatccgaggtgttggaatgtgggtagactgttgttgtaacagcggattccgccaatgcgatctgcgatttcttctgaatgatggtcggaaatcttatctgtgcaagtaactcgttggaatgaggggcgtgtcacgaagaaacgaaagtcgcaaagtcgcgtcgtcaattgtcgtgttcagcgtttaaccatgagctcggcaggagagctgagatggagggggcgagtagtttatttgctgattaggaagtcagtatcacggttccccgaaggaagctcgataggcttgcgcgagactatcggcgcgcaatagagtgacttacgatctggcacgcatctttctgcgcttgcgcttgagacggcgagtgcgcttctttctccacttgtctctcatcttcactctattgactggttagtgcattgctctcgaggagaccttaagctttgggaaggatactcacgatttcgatgatgaaacagagatagtagaaagaaagatgaagtgagggcggcccgagatgactttacgtacagtgcggctgagtcagccgccctcgcttaggccccacacgtgacatttcaagcatccatctgtgacgacacatgactatgccaaattaggaaatttgatagggtttcactccatcgaggtaattgggcaaaccatttgaaaataatttatgtaacatacaaagtacgagtggagattgtagggcaatgacgttagttcaattcaacatccaagataagagcaatgccattactatgtattattgactagctatagctctaaattagaacccgtgagagttttgatgccagtgttttctcttgggtatacccagccgtatattagacatatataccacaagcttcatcactcattaagattcgcggaaccgcaagacgaggtccacaaaagtaaaaataaaaggtgcatcatacggaagtatccatcctggatattttctcagtatgtgtaccgataggtgggcgccaaatcgccgagatattcctcttcatcctcgggaatcgcagcagggtcaacaggggcgcggtcacgtttcttgttctcaaaccacagggccaccatgtagagtgtgcatgatagaccggcgaggcaaatgaacgagaggcagatgatatacccggttcggaaatctgtcacgccattctttacaacgaaagaataagtagcgatgattccaccaatattaccgaagccaacctgccatgcggttcccacgctgcgtcgatgatggccacccaagttcatggcgaaccagcatacaatgacaggcatggcgctgtaacagccgctggtgaccagaaagagtgcgccaaattgcgcgctggtactgttgtggattgtcatgagcatggcgaaaccggcaatggcgatcgccattggaatcaaggtgaaaatgaaccggtgtcgcagccggtcagaacagaaggcgattaccattgagaagccgaatgctgcagcccagggaggaatggagtacagctgggttttgatcgcactgtagccgtaggtctggataatcgatggtgcgaagtatgcatatcctgcatgagagtgagcgacgactcggaagagcatgtaaggaaaaatgatatacgtaccataagccgggacaatcaagccgaagtacataaaacctccgataaagaccttgtctgagggaagtcagcgcgctgcaatcaattgcaaaaggaggggtatagcgctgtacttacagtccttgaacacacccagaacctcgcgcttccccaagtgaacattgtgcgcagccttaccgacatccttggccaacttagcacgcatgtatgtgcgctcttcctcgttcagccacttaacatcctcggggaaatcagcaatgaaaaagaacaggatgatcgcgaccacgctggtcaaaacgccctcgattataaacacccagcgccagccactgtagccgcacatgccatccatctttgcgattccgctggcaagcagaccaccgaaggcgccggccagggaagtggagctaaagaagaaactgaaacgcttctgagcctcagagcgtgtgtaccacatgcccaacagatagaaacctggcgatcgcaattaacacctgtcgtaggagattttgttggtttttgcacttacatccagggaacatgcctgtctcaaaaacacccaaaaagaagcgggtagccatcagtccaccccagttctgtaccagaccctggaagagcaagaccaagccaaacatgaacatgcatcccgtcactgagtccgaattaacaagccgccctcaacaaaattgcgcttaatcgcacggggcgcaaacacttacaccagacatggggcttcaacttcttgagcaagatgtttgacggaatctcgaagataatatacggaacgaagaaaatagtgagcgcggtgttgtatttcgtcccatcgacgatgttcaaatcctctttaagtccaagaatagcggcattgctaatattaactctgcaggccgatgatgtcagatacaagcaatgcctggtcacacgacgcaatggtaagcttacctatccaaaaaggcaagcaagtacaaaatacacagacaaggtagaatgtgccaatcgaccttggcttgcaacctgcgcttggtggtagtcgtgagaggaggcagatcgaagtccgtggaactggtctgaccttcgcccttctcgacaggctcttgggtataggcgggttgttctgcgcggaggagtagctaattgtcagcaggagttgacaatgatgcgctggcgcgcgcagacttgctaaaccctaataacaaaacaaaaaagtcctacatgtataggattggacatacctgagacacccatgatgaaaagcgaattgcactcggggacttggaataataataacggggaagaaaaaggaaggggaaagtttagctttttgaccgaattctctcaagcgcagctcaccgcagggatgttaccgaggtgctacgcttgacaggtctcgaacgtggggtaacttccggagttacggagagcgaaagaagcgaggctgaaagagtaaattgaccttggcgagttgaaggattcgaattgcaaaggatgaatcatcccttgaatatcggtcgagcccgatctcggccactagagcaagccccatttttattatttatttattattttctcatttttgcttatttctcggaatatgtacaacatacacatactctgctagtgcaatatatgcaattagatatccatttttacaccttattttacccttttactactttactattctgtgctgagaattccctctcgtccatatccctgtttccccgcaaaatagcttggaagtcacgtgttgaataagcagatatccacatagtgcgggggtgcattttggtatttactattactattagtattagtattagtactatgataagctgaattcattcaatctgtttatgactactgtctttgactctatatactcattacggagtacggtgtagagtattagcagatatgtaatagttattaaccaaaaaataaaaataaagaagggatcttcatgtctccttggcccactggttcccactccacaagcttccagtggtccatatagccaatagtcccagccattgatcatccacaccatgaaactggacagctgaaaacccatgccggcgcccacaccctttgttgtactcttcccaattcgcacaagctttagctccacgagtgtcctcgaacacatgatcgggccgaacggcacttccttcttgatatctagcatatctagggagcttcaggaaaattcatggctttataactgcgatgcatatatctctagcttttaggaacgtgattttcggtaatttttaaaatgatagtaagatagtattctactctctttgaacttgatatatagtgctaagaagttttatcaataactattaacaaatagggagagaggatgaaagtatggttgttgagatataaacgtggaatatatcgcattgactattgttttagggtggccactcgcttgtaaaatacgttatatgaacctttgatgggacgtgacacatctaattctggctcacactggttcagcaaaacatgaacccactcaagggagtcctgtcagacttactccgtaccacttcctcatatccagataacgggagtctaatgtagcattacagaaccaaccagcatccatttccgcgtctttccctattagtttagggcgtgccaagtgcgagagcttgcctcactagcaattcagcagacttgcaggtgcctaggtattaggaaatgcgcatgattttggttgtttgctacgtatagcggttgatcgagtcagctgaccgtgaaaaggctgggctaaataaccccccttaaaacaagcatgccggctccacttgggcaacatctgacgttctggcgcgaagaaccgcgtcagaatacacaggggcttttcgaaacaagaacctttccaacttcttgtctaaaccttggcagaggaacttcaccttgctgtccatgcgttgattccagcagtccattacgtataacaactccgccacccagcatatccataaacctcaatcactttcccctccaggaccttatcaaagagatggggtgtagggggctctggaacctacacatcgatggttggtgatcgcccgtattatacggggcttgtaaacgctaacatactcttttagggaaatggtaccgcttctatcaccctcgagcgcggataagtccccctgataatgagtcgacattccgaacaatcaaaagtttatgcgataagcccgacgatcttgaaggatgggaaccagtcccgtttcctagcccaattcactcgaatctagattatgtgtacactgtcgatctagatgctggtactttcacaatctcactatggagtgagcttgaaggatccacgtcgttgacaccttcggcaacatggatggatctagccaagattcatgaggcatctagcataaatcatcatatggtgcagaatcctcagtatatgtctagtgaatatgtttgtgggagcaacgataaggcgcaagcaaagcaattcgagacgtttgaaatcgactttggcatccctacacccatgaacgagctacaggggcgattctttaccgacctcgtttttatttggcgcttctatgtcgatgacccctccacatggagacacgattctcctgtattcagggtactatgtattgctttcttgcgtcttgcggcctgggattttgaggtatctttcgattacaacgtcgagcttccaatctcattcgcgtcgattcccctttggagctaccccaacgcggacgtctattggttccatgggtaccttgttgttttacaagatgacgtcgaatccaatgccatgataaacggagccgtctcaaaagccgagtcatatattggagactccctactcagacatgacgatgttcgcttgattgtaatttcaccacgtcatgtcgctttcgtggagctttctcatgaggtcgttctgattgggaatcttgtctcagttccaccttcgctcatacagtacacaatcctttttaaccactcattctctggactagcttatggcttggaagatagctagcttctaactcgaggtcgttaataatccgaacctcaccccggggccccagggctccctccaggctccaggaatcactccctttccatggcagcctactcggtacttttggtacgtaattcgaggtgccccatatcatcaacctacccttctatcaccggtttaaattgctcatgcatggtgcctgcccaggtgcccagataatttctgatcagataagaacggatgatgaaaaataacgttcactgaaaaaaaaaaacaacaatttgagattccttcgatttagagatcgctggcagaaagaggattggtatgattggtatcataggtaccttaatggatggtggatgtcttgaaggccaggctagcaggctagtaggctagggtaactactatgtagttaacaactgatagcaggatccgggagctcttctttcttcacacaatccacttccctctctctgtggctttcagtctgttagactcaacatttctctatgtaggcaggattcttttgtcttcccaaaatgagctgaaaccaaaggcatccaaatattgttgagaaatctctctacccctatagggaatgctgtcccccagtatgtaggacactacgtggttcagctatctcgcattgtgcgttttgtgctacggcatcactccagttctgacttgtagctcccttcgatgtggtctcttctctatatgtttgcccgcgacaccagagagaacactgtccggccacgccttgatgcgggttttctgggtttagcctacttcctatgccgacgcacaaactgccttctatgcgggatgggcatactctacgtgccacctatcgattacactacacgacacctacaaggctcggagagaaagccggtcaaagtgtctcttccttccacggccgtctttatcttagcaactctgaccatcctaagttgcatttatgagactcgctagctggaccactagcagcccctttccacttcggccactcggcacttgtaagacaggtgtaaccaaatgattgctacaaagaccaagaaggtggagattttgagacaacccgagaagccatgggaatcgactttgctggttgcggtcccatccgccactaccattgacttcattgttcttatattggtgtctttcacgcccacaatagctctacccaaccaaaagaaagagatagccactgtaatattatcaatgcgaaatgtgaactattgaatctcgacagggatatccttgtctagcgtgggatcgacccgaagttggctgtcaaacaaagaattaggccgccaagtgggtttgtagacgcttagaaggaaattggaggcaaccgcgaggctttgatcataaattgtgtcaaaggctgcatgaaacttagggggcctggtcgtatatccaattggcttgatacaacctttcgtttgctattcgattccttctttctcttctccccttcatctttgccatattccatgcctgtcactccaagcgtgcactctttaatcttctggtgtatgtaattattcacatgagacagtgatttattccaatcttggttgaatcagccttcgagtcaccgtttctttgcggtttcgcttttcaccactaccacaatgagccttagaagaagaattaaagtgcaggcatccaaattcttatctactcgtcgtggatcttgtataatatttattgccttcatatggttcatcttttatcatcttccagctcccccttccacccagaacaatacccgcgcagatcgaccaccaccagaacatcaagtagaggacacgccacgattcatctaccgctccccctttcgaaacaatccggatgttcgatatgaaaagcagctatcggatgccctggagaacattgaaaaggccgtattggcccgaagtcaggaaagcaacatatccgaagataaaatctggcagatagcgaaaaatcaaaagcacaggggcgacgactcaatagtattccaagggaaaaataaggagtgggaatacaatgtaagtacttgcacctgcgaccacaagtatcttgcttgactccaactgaaactacaaagttagtcaccgatgaaaaggccatcaagttcgtaatcaacgaactatctgccatccccgaaatcgcaaccatatacaagtcctacccccacaatgtcctccgagcagacctcctcagatacctccttctctggtactatggaggcttctacgcagacatcgatgtcttccccgctcggacgatcaagacctgcccagcactagaatccttcttcacacccacacccgaggattacacacaaaatacccaccccgatgtatcactcgttgttggaatcgaagtcgacgagccttatgcctcaccacaattcatgcgcgactggcactggacaaggagctatggactcatccagtatacaatgtatgcaccgcgacgtttcagtccgctcctacgcgagactattgtgcgggttttagcacataccaggaaatacaatagtgaacataccagcctcttttcaagtccggcatatgacgagaagactatactgggggttacggggcctgatgtcttcacggatgctattctcgacacactttcctcttcgcttcctttgacacatcctctcattcaacaatcagttgaagcagatgcggatataggggatctcatctctcctacaactcaggaggtggagaaaggggtaacgtgggcgccgtttcataaactccgtgaccctgtctgcatacaggcgggtgaggctgtgccaaataaatccatgggtgggttgtgcgtgttgccaatcagtgcttgggggaacggacagagacatagtcaggctggtgggtttaatcaccccaaggcgtgtgtgaatcaccggtttgggcggacgtggaaaaaggggtggtgggagtatatatttggatgaaggtctcttatttgatctgcctttgatagtggaatataaatctctgacctaaattggatggaatcctttctcttacaatgaacctttttgcatttgtttgaatgtactacgagatggtagtagatcagattatgaaggatgcatacctagacatgtaggtattgataatgaatgtattgggaagcgaaagctattgagaaggaaagaaaggaaaggactataggaatcctttactaccacaaagaatcaaaacagcgttaacctcagcaaaagcgaaaatcctctctgttttcgcccaaaatcatttgtaacactggcacccttcctttttgggattctggcaacgggcctggttgacggaacaacctccacagaatccacacatatcaggaggataacagttgccctcacctacgacacaacttccatggtgacccacacatttggtgcaggctcggccctcaaggcctctttcctaaaataatattgttaaaaattgatcattccttataatcggggtaatcggtattatacctgcaccatgctttgctgtacggagtcagttatggtgtccaggaaatctcgaagactaaggacttactggctctccgtagatgatttcctcgccagactggtacatttctagctcgacaccatttgcagcaaaaagaccactctttgcggccgatgcattggcgataagaagggcgaggattgtagtgccttggaggaatagtttcattttggaaggaagttgctggttggaattgaagctggagggatgtattggtttgaggtatgggattgggattagacttgtacagctgaggttgatgaccaccgcggaggttcttatatcagaaattagtgattcaaaatatgttttctacccctctgttggcaatgtcaatatgcaatccttcagtttaggcgaccagcaatgcaatccttcgacttatttggtgtatgcctgccttggcgatactgggggtagaattggcattggtaaacactagtagacacagagcctcggattctgaaatagacggatgggtatcttaagatcgtcaaccaccaaacccaactcagtaatggattggccttttgctttttctgacagcacacgttgtgtttcattggccatcttcacatgtcacgcttactgttttccgttatgtctgactgcaggatttgctttattttgagtctcctgaggcccgtccgaattgaaattgggctgggccttgcgatgcgagttctcttcaaaccccctttggatgactgatacctggcccgtagccggatatttggaactctcgggaatacaaactccttatacggaacggataatttaagagttcagtattccttacacgatgataatctaaaaagactcgaaagaagagccctgctttctttttgtatgggatcgagcaagctatctacagctgctccgatgattccggtgccaagttataaggaaaagccgtagccgtcttatccgagtgatctgcggggacaaagcaacggaccgagctctagggctgaggagatgacccccagtctctgagtgcatccaatagtagctatggaacacggattggcacgaaagcaggcccaatactaaccatgcggagacaataacacacaaaacggatgcctgcatatacggcatagtaagggaattatgcagagaactgccatttatccccataaagttggaggagagccctaagtagagtgccccgcttttgtagagtgccagaccagtctgatctgcatccgacctagtaagtgtgttggatgcaacttccatcgttgttttggtcaggaattttgatattgtctggtcttacaccactgacacgctattaaggaaaaaaatatccacgggtacctaccggtactgtcacccaagtaaatcgaaaacccgtgaacccagagagagagagagctcaaataatgtgataacctgctaataaagagcaaaaatatgctactccacttctgtgacctccatttgtatctcccgtttattacttttattaccgatcctcggaacaacaatagtagttcgcggcggtgcaaatggaagcagcggtttatagagcgcctcggagtcctctgttaaatgagcccccatgttttccgtaaaataaacctacgaaacatttacatttagattcaagaattcaaaggataaatccgtgaatggtcagatcctaccgcagttttaacaatcctgtccaaaccagagcgcgccgctctatgaatcacctctatatgacgaattatccgttccgcacttgcgattgattccgaatcatacacacccacgaggcatagtcgctgtccgggctacaacgtagattgtcccgttcactttggatgcccgggactgccaggagtgggtagattactgaaatactgactggaacagttcctcctacggagccgcctcgtgctgaagagagtcgcattagtgacaggagaagccatggagattcacgtgaggtcgacctacgttcaggggctgctagggtctgtatacctttaatgacagccctacggggctggatgctatcataatccggcagattatcggcttgtcctgatgttgactgcgtggtcattttgagacgaaaagcaaagtgggataggttgtgtggtcgtaaatagtctgcatattttgccgctgataggaaggaaggacatcgcatggcgcggagtgatgtgaggggttgggcctatcacagtcccgtatagcgacacgagaaggcagggggatagggagggtttgtcttattcatttcccccacaacatgcacgactaggtacagacgaagagctggatagcatattttgatcaatgccaggagtatcaaccttccatattcgagaattctaatcatacaggtaacaggtgattctcacttctcagtcaacagaacccgtctcgctcatgctgcaggaagtacccaggttgtcacagactgactcggaatattgccactccattcctgaccactattagtcgataaagtaatgtaaatatcattactgaacgtgttctcaacaacaactgtgcgagtcccatctggattcagcgaagcaacagactgcactcctccaccattggaatacgtgtagctcccggtgccactcagcacaatggcacccggcggcataaacttgctgaattgagccatcatatagtatgctgggttgaaggtatatccaccgttggcgatagtcaccagacctcgacagtttgcacagccgccacttgacaaatgcggaccgtcttgatcatttgtacctagtgtccaggccataacgcccgatgcccaattttgcaaaggccccatggtgaaatcggctgcttggttccacgatgcggatgcgggggtccagcattctgtcatgtattgtttgatgttggggtttgtctcgtggaattgggtgagaactgtccaatctacattggcggcataacagtgccatgctaccgagtcgacatactggccagccacgttgatgacgttctgagggtaggatggcatgtctgatagccgtccgttagtagacggaatattgactcaaaattactggttctcgagagcataccggtgttgtgatcatatgcccagatatcggtgttcatgccggcttgagcgagagctggaccaacataattctggatcaactgtgcagactcgtagtcaaacatatacatcgtaggatatccagcttggctgtgcaaaggctcattttggatggtaattgcatcgatgtgggcgccgagatcttcgtaagcctggatgtacttgacgaaatactgtgcaaaggcactggcatacccagtactcccagtgcctcccctagtcaagtagccatcgttcaggttattatctttagtagtgcgatcaatcacaccgtttagcttcatccacccgggggcactccaaggagaacccagaatcttcaaacttgactgaagggacttcatcttagccagcatcgtagccatggcatttccacggtcgcccaggttaaaactagacagagatggacccgcactattcccgttatcatcataagtatacgatggatccccagagaggtcggaagcgccaatcgtatggcgcatcaaagcgaaaccagcaccagcaccggtcatcagctcgttgagcagttgttgcagcgttgagctggacagcgtgttgaaagaggtgactgtggcatcggtgacagcggctccgaagcccacaatggtttgtttgtgcccgctggatgtatcatcaatgctcagcttccaggtcgatccagaaccaggactgccactgccctggactggtggtgcaattgatgagagcttatagttgccatctgagtttgagcagtaggctgatgcagcagttgctcgctttcctggtgctgcctctgctagcaccgaaagcaagagcagaggaagaatagatggaagcatgttgtgtaatgtttcccaatatagcattttagaaattcaagattatcagtcatggggatgcaccgtccttatatgtcccactggagacgaccttgtatagactatacccggccatttttctaaaagatgaaagcaagtaacattgagggaaaataacctgagacggcaaaaaatcagtcatcccccctccctcttcagccatcagccgacgagggatactacagtaccactgactactgcacgccacaatttcccgacgggagctcgatagcttgtgttgtcttggtgaatcgactatctcggagaaatgaccctttcgaggataatacagttacttagaacggtattccccgcattcttgatgggttttataatgctattatgctactgaaataggtgagggttttgcctgggtgctttagttgcttgttcggcgcggggttgcccggaaacggcgtgaaacgccaggctgttgtggaagggttgatttaccggaacaagagatgaagcgacagccaccaatccgacctggaactttagataagagcagaggcaataattagtgtgtagatttcttaaaatgaaaaatagtatcaataatccctggctgtccaatacataacagaggagaggggatggggtcaaaagaagtatatatataacaaaaggtcaatattgttcaaactgaaaccagttattcatgtttccatcattggtaactattatactcgttgtattcgaactcgtgagttacctaggtaggttatggaagagttagggtagaaggtagccacgtgcagggtttccatgggtgaggagcttgtaaacatccatggattttgcgagggaatctgaaaattgtcagaacaatctcaaaataatgagatgaaatataagtggaacttacgagagaatgtcaacgaatataaagagagcaaagaattcaggttgttcggtgccgaaaacaggtcacctcaaccctgcccttatgacgtcaatactgggatcaggcgtctcacaagtttatagcggtgatacccccactggacttatgattttgctccttcaaacttcgtccacttgaaagaattctgaaagccagtctacaccatgagcggctacaagtttcccgtcgatctcaagcagttcaagcagcttaagcttgacccgaagaccccccagctgtcagcccaacagaagaacgatttgctacacaatatcaacattttcagagatgccatcattgccttcacagcaacgggtgccgcccgtggcgtcgcgggccacactggaggtcccttcgatacagcccccgaagtctgtatcttgcttgctttcataaatgccaaccccaacaaatgggtcgatgccctgtacgacgaggccggccaccgtgtcgccacacaatacctgctggctgcattggacggcaagatcgcgcccgatgacctgctgaactatcgtgccgccgactctcacctccccggccaccctgagctcggtctcaccccaggtatcaagttcagctctggtcgtctgggtcacatgtggggtatggtcaacggcattgctatggcaaataatgacaagaacgtcatcctgttgggatctgacgggtcccagcaagaaggaaacgacgccgaggccgcgcgaattgccgtggccagaaacctgaacgttaagctcttcatcgataacaacgatgtcacaattgccggacatccctcggaatacctaaagggctatgagatcgctcggacccttgatggacatggcttgaaggttatccgtgcccagggcgaggatctcgactccttatacggcgctatgtgcgaagtcatcaaccacgacggtcccgccgctgttgttgtcgaccgcaaaatggccgctggcatcgagggaatcgagggagaatgtcacgcccacgacgtagtccccgtcgaaatcgctcgcaaatacctcaccaagcgcgggtacagtcagcaacagcttgctttctacgacgatatcaagcctggctcaaatcctcacaagtacaagggctcgaccaaggacaagggtgcgaacaggtccattttcggtgaagccgtgaatgaaatccttgacaaactgagcaaggaggaggctaagcgtcgagttatggtcatcgactccgacttggcaggctccaccggcctgaagtccatcggcgccaagcaccccgagtccttcgtcccatctggtgtcatggagcgcggcaatttctctgctgccgctggtttcggattcggcagcaatggagagcgccaaggtgttttctctaccttctctgccttcctagagatgtgtatctccgagatcaccatggcccgtctgaacgactgcaccgttctatcgcacttctctcacagcggtgttgacgagatggccgataacacctgccacttcggtctgaaccacttctttgccgacaatgggctgatggatgcctcgatcactacgctgtacttccctgccgatggcgagcagatgaaggccgtagtcaacgaggtgttttggaacaagggcatgcgcttcattttctccacccgttccaaggtcccttacatcttgaaggagggcaccgaccagaagctctttggtgagggctacaagttcgttcccggcaaggaagaagtcatccgcaagggctccgctggttacatcgtctcgtacggtgatatgctctaccgctcgcttgatgctgtcgagaacctgcgtgcggagggcctcgatgtcggtctgattaacaagcccactctcaacgtcgtcgacgaggagaccatcaagttgtatggatcctcaccattcgttctggttgttgagtcgattgcgcagaagactggtctcggatgtcgcctgggcacacagctccttgagcgcaagttcacacccaagttcaagtccattggtgctatcaaggagggatgcggtggcctgtacgagcaagtcaatgctcagggccttggaccgagcgatatcatcgctgcagtcaaggaggtgtctggaaactagatttgcaaatgtaacgactttacacgtaataatcaagattttctcttctatttgtccactccatctttgtatatgtgactcaatttcctctcctaatcaaggccaaaatatcaggacccccacattcgtcccgccttcctaattcgatgtcgtgcaatcgaagcgacattgactcaaccggggctctccactaaattccccataatcttctgctagtcacgccgttgattggctgaactccacaaagtctgtcttggcagatgaggctagtccccaaagggcactagagcacaagagcttgaaagcacgcaatctctcaaaaggatgagaataggcctaatgcaccattaactaacactttcaggtagctagttggtttcttcaggggaaaaactatatatagcgtgtttcccgtttagcctttgacttaacgttgacaattttatcctcgtggtttgattcaaggtgcttactatctttaaccttaagccacccgggacacgccataatggccgaacgagcctctatctcggcattgtctgatacgccgattgaaaagcgagtatggtatcgcggaacactcttcaatgcctgtattatcgggggtgttggattcacagccccaggcttatggaatgccatgaatgctttgggtgctggtggcgcgcaggagcctttcttgattaatgcagccaacgcccttgtttttggtctgagtatgtggtgtcttgcggccatcacattgaaaatttcaatcgggctttgcgctaacttgcttgttagtggggattttgtgtctgttcggtggccctatcgccaaccggattggcttaagatggaccctgatgctaggcgctgtggggtatccgttgtattcgtatgtatcacaagagagaatgtgaaatattgttatcttggagctgacttctatatatagtgctgccttgtacacaaataatcgttttgtgagttcgacgttgattagaaccacctgtacagcccaaggatgaaggctaatcttgtatagggaaatgtgtggtttgtactggttggatcggtattttgtggtttatcgtgagtatcctatatctacaaaatgaaataagagcatggactaaccttcatagtgctggtctgttctgggcctctgagggtgctgtggcactgggatatcctgagcccgcaaagcggggacgatatatgaagtgagatattctacaattttatacagtggccgagtgactgacttaagaagcatctggctttggttccgtacaggtggcccgttggttggaggtgctattgtccttggcctcaacaagtatgtctaatttcaatacatttacagacggagtttgctgatgattcaaaagtgctgctgacgcccatgccaaaggaaaagttggctctggtacgttggtacgggcagactaaatgccatgaacgattgctaaaacatgacagacacatatctcatcttcatcgctctccaatgcactgccgtgcctatagccttctttctcacttcacctgacaaggttcaacgcacggatggaagtaaagtcaggattatcctgcaggactcgtggcgtgatgaaatgaaagagctctggaaggtctgccggcgaagggaggtaggtttaatatgatttcttcgtgcttgtgtggtgtacgtgactaaccttcctagattctcttgctattgcctgtcttctgggccgcgtacttcaatatgtacactggaagtatgaacccagctgtttcttcttcactgttttcaattgctgattaattggtctagacttcaaaacgtactactttggggtgcgcgctcgcgctcttattggattcgtcagtatgtttacaccctcgcattgtttgcatacgcatttgcatgagtgctaacatggagtaaagcctacttctccactcttctggcctccacactcattagtaggttcctggactaccgcggcctttcaatcagaaacagaatcaagtacaggtacagaacattgaaacttacaattaaagcgagaatacaggctgacgaagtccacagctttttctacgtgatcgtcgtccacatcgttgcctgggtctactgctgggttatccaagaaaagtacactaagaacccaccaacgcttgactgggccgacaaaggcttcgttgagggattcttcgttatcctcctctggggtgagattcgtgaatgatttaataccgcgacattgctaacccttccttcattagaattcgctcagcaatcactacaaaacttcctctactaccttctctccacaatgaccgacaacatctcagaactatgtaggttgaacccgacctgattatactatctacagattactgacaagatatagcccggttatccggtatccttcgtggccaagagagcttttcgcaggctgtctcttacggcctcaactcgaagaaatggcatggcggaagagtgccacttatcgtcaacacgattcttctaggtaagcgatacctactaaatgattataaagaagcagtgctaaccttttcttccagtcctttcagtgtggcctacttggctcgttgtcagggcccacgttcccatcgagcattccaaggagaccgctcagttgcctcaagcccaagacgaggagcataacaaagttagtgtttctgacaaggaaaactttattgttgccgaggcagttgcttcgaaataatatggattgatcaacggtcctccctgccaaagaagaattatatttacgatcagggcccgaagcgtacaaaaagctccatgattattcgaaacagtatttaattcacgaatgagaaatgcctatattctacaagtaataccgcacgaacccttacccatctttcaaaacatgagaatgccctcatcattctggctttcctcgtgcaatttccgctccgcacggcgataagtaatgggatcaaatgaacaaatagcctcgagggattcgctcagaatattgactctgtatgcattaggcacttccgtaagtcagaccccccgtttggtcatcgacttacactttcgccatattgccatacagtcgttctccgtagagctctcttaatagggttgaagtgtattggggtatctcctggtccccggtttgttggttatgcaaacaaggggatctctatggttggagagaaggcgcaagtgctataaagggtgaggaatgggaagttttgccggtcaaacccagcctggcatactgggctgcatatgaccaggatattagacttgtattgaagcttccaaggatccttatatctgtaagggcagaatagtggatcacgccaagacatgagtcgcgttcgctgagtgaacgagcgatttgaggtatgcacttgagcagtttggtaatccttgttcattgcaacaagcaagctcaaaatggccaaagctatgtagtttcccagttctaaaggggactaaattcagaggacaatgacgtacctacctaggtaggtaaacagcaaacctgactaatacagaaggcggtcagtttctgccagaaagtggggttataacgaactaaacgtccacatattttgcccttcggggcatatggtcaactgaaaatatacagagaagattagcatggcccctgcactaaggatgacacgcataatcaaagagaagctacctattttttttcctttacagaccctatattgaggttatagggtggcggcatttttgtaacctatgattggccctgcgtaaataatatatcacgtgattgacccacagccccacgtcgcaggttcgaaaccgaccaacggcgattggcaaatttattccccactcttgaatttggtcgcgataaaatagcaattatgcctactctgtatacagacccctattaagcagtgatcacgatgttgactctgaaccaagtttcccaagacgtttagccacaaatggcctcggatggggttatgtttgggtgattgcggtcatctcccagttatgtcactatttatggggccctggccagagttacggaccttactaacttattgtccacgtacataggcgtctgtgcaacggacatattgtaccacaacaatgttgagtatgcacatcatcttcaatgtgaacgaatctcagcgtgagctgcatccacccctgaccctaggggggcttgtcctagcgccgatctctcttcgacttgatcccgttacatattgcccgatcagaacttactttctgtctccagtctgtaagtgatattttcggtcaaatagacctataaacagagaaatacaggtctacatttcatccaaacaacatctcgaagttcaagggtccgacctcgggaggtccatggaccaacagcagccggacccactcttccccgcggaatttccctattgcaacgactgatcttctgagttaacggctggctgaggttgccggatcgcaatagacaagatacacatctaacaagagcccagcttccagtcgttgttttcgtgcaatcttaaggacaggacacaaatcgagtgtgctccacacctcctaggcttcgccgagggaaacctcccgcgggattcccctctgcctgggaagcactgacaaacaagatggagagtggcgacgagcgaccataccgctcccatacgaagccagcatgcgtaccgtgccggcggagaaaatcgcgatgcaaattggagccccacaccgcggcctgtctgatgtgtcgtgcgcacggcacaaagtgtacgtttcccaacggaagagcgaagtcaacaccgcagaagaggtattctacggaggcagacccaccactaccacatccaacattacgaacgccgatagcagctgcacagtcactgagccggccccctctggtcgccacttcgtcgcagttctcgattgttacacaggcccagaacgaccaggacacaccactgtctcttgaagccgaagatgataatccgcatatccttggtccagcggtgaccggggataatcatgtattggctgattacctatctaatatttcgggtggtcagggaatccgtgaaattcgccccgtcgagccaggtagttcctcgtccccggttatattcacgaaggtgcagaagcggccgctggggctcatggtgaactctagtccagcattgcataagttacagactattgaaaagcttgtagagccgtggggaccgcatctgatagacatgtgagttacatctgacattaatattcggcagaagctttggaaactgatcgttgtaccagatatctgagaaagatcaatccttgcctcccactacttgaagaaagctcctttcgggcgcaatacacaaatgccagacaccgcatttctcctgcgcttttggcatgcctatatgcccacgtgctcacccagtggcaacatgacccccttctatcacgagaaagatgcccagacgttcgttttgtatggaatcttgccattgaagcctcgtattccgagttgcatgcgtcagctgggatatcgacgataaaggctattctcctcgacgttgggggccgtccaaccacgtctatgacaggaaacggggtaagacttggctcggctatcgcgttgtgccattccctgggtttaaatcgaaacccactcccgtgggatatcccacgggaggagaagtacttaagaatgaagatctggtggtctatcttactccacgatcgctggtatgttccgagcacatccccagacaatgggacatccaaggaactcaccctctaataggtcgagtcttgcatatgggacacctccccatataagaagatcacaatacgacgtaccattaccaatatccgagtacctgtcagattgggaacgagatcacgaagcaaacgcagtttttatcgagctcatgaacttgaccgacgtgctagaccactgtctggagcaagtgtacagcatccgaatcgaaacccaaggaccaagcagaaatctagaattagagttgaacaaatgggtggactcactcacaggagacatccgcaagatcatcatccgcggctcaaacctaagcattcctggtgcctccaatctccgtctggcatatctggcaacaagactcctcctccggcgcatagacctagatcacgagcgacaagcaccagaatccaatgcagagcaaatggccaaccgtgttatggaggcccgaaggacggcggaggacattgtggttctggtccaggaacttggagaaacacaactgggtgacttttggctacctgttgtcgcgttcacattttcagcaacggtgacatttttgattcgctgcgcactagagacagatcaggccgcgggtcttgcacgaagtggctccctaagaatggcgagtgaccttttggattcgttgcgatcacatcgcaagaactttgggtgggacctgggtgatatttgcctcgcgcagcattccgatgtcatcgacaagctattgaagtcagagccaccagtcgggaactccggggagatgaatgctgaacttcgtcagcctttcatgccggatatgtcttttgttgacgatatgtttccgagcacttgggacatactgcaaattatggagtgaacgaaaatattcatgaactcattttacaacttttctatgcccatacgatatcccggcgaggctccttgtcatatatatttgtagcagtatgtaccagactgccccttggatgttgctagccgccaggagacacgggtatctttcgatttctggggtacggagtaatactaggcagacattcgggggtaaatgggcctacattcaccgctaataacttaaagaggtttagccgccgcgagacaccactggttgaaagcaagtggatgccgtctggcaaagcacgatagttcagggaacgtaagacttgctaacgtctgcggcacaaggtccacatctctcgcatttgatcatagctcctctcttccattcccgaagtgccccatagcacgaaacagtcgcatggttttcccttcctgcggctcacaaagcacaacgctcctctcgtttagataatgtgtgatcgcctgcagcgcatcatcagcctcctccttaagtaccttcgcctcaatctccatcagatgcagttctccagctactacatcatcaaacttggtcttgtgtccaccgacctgcaccttccacttcgcattctgatagggcccgtacgcacgcagcatatcccagtcgacagtcccataccgttcggcgaactgcacctgctcctcatgccagattttactatccaaaggacagcgtttttcgcaggtgaaggatggccggttaccgccatagtagtcccaggagcagtcgacaaagtctggaacaccaggaactacctccggaaagcggactttgactgtggagagtggctggcctttgttcgttttggtgcggaacattaatccggagctgatatgtatagggggatcttcgtcgtagtaggtgattggattttctttgtacgggagtgcttcatcgagtccaagctttgcaagcgtatcttgtggtgttgggtcgcaaattgcccattggaggctgatcttttcttctgcgtagacgaagggagctttcaggaagaggctgaacaagattgtccgcggtttcatggtttcgattatgggtaactaatgaagtgatggaatattattgaacggaggactgtcaggaagaatgaaggaagaaattttaagatgtgatagcaatccacatccatgcatgcaggggctcgtaggagttcggtgacgtcataatggttcgtcaggcctataaggtttaaggttaccgtcgtattcccaaggttgaacaggtccgagccccgtagggcaaccaatgcaatcagtcttagcttttccacggggtcgctttgaatgtctggaaacttgacgtgtaaggatgatctattcgttggagttgttttatcctttactcagttagaagatagcggcaaggggtgagcactaaagcggaaacggaaatccagcttgcgcggcctaaaatgcggtgtacctaggtatactaggtctatggaccgaattttaggcaacgggaataattaccccatcgggataccgcctctttatgagggcgctccgagttctgctcactgagcatctcacggcatagagtgattacttagtgggtacgtggcgattcttacctaggtagtgatgactgaatagtgttgagtgaacgctgtataaacctagtccgtacgcagcggcatctagttcggcttttcgccggtcctcctggacttttaggcttccgatgtcgaattgagagtgtcgaagctccgagataagaggtacgaggaatcgttctcttaacgatttcggtgaggctaccgatggtgcctaagacagggatttggattaagtctctcgctgtatctggaaaatcaagcgttggttttgtgattagtttatggtcaacttttctgtcaaagagagattacgatatttccatcaaattcaagcatagcagattatatggcagacgataaatatgcatgaaagaaagtggaaaaatcaaatagaggccaaattcatcatataagcagggcgagcgaaacataacctttcttcagattaaaactcctccctctgctccgcccaatcaaaatttggtagccatccaacacgatgttgagaatatagctctgcctccggcttggattgttcaagtgcatcgggtccatcgagtgttcctgccaggataacaaccatccctgggaacttttcgtgggtcttataaatagaacaaccacatttgctgcagaagtggactgtcagtttcatgccactttcgtgcatctcagtatattttatgggagatccatcggtgacacgaaacctgtcttctggaaccaacaagttcaacgtgtttgttccaccgctgatcttttgacaggaaagacagtagcatgttgcctagatataggaatagcttagttataggacttacgaaatatagtcaagctgcttaccttggttgtaggtccagatgcataatcatacttgaggtcgtgacatagacatgatcctgtaggcatcgtggctacgaatagttttacaacgggggagtttgaatgtcgacccactgattttgatatagattgaataggatcgcatatccttgaatgttgttcaaggctttctaatatatacgaattaattataaagcgtaatcctcacgtcattgtacactgaatgcccgtggcaagttgtggtagtgacgctcacctgatcattctatatcgcctgtggatgccgttcgagtcaatttgaatacgagaagtataacaaagaaaggaatggaaaaacaaggccatcaggtagagagcagggattagttagaagagaggaaccacggatgttagacccatggatcgtatagtatcgcccagccttatttcaggcccagaacaatctagtaacaagccacatatcgtgtctagaaattcaatgttaccacttgtttaattcaaccatgccaccagttcagtccggacatattagctatctagactcaggcgtctaaaaatcaaggaatttcttcaattcggaaagtggctcgccgttttatgatatacaacgttcaacacttcaagaccgactaagggagccactaaagccgcgcgattgctcaagatactttgtatacaattgacagaaatttaacctcctaggagacgctgtgtcgctcctataaacttgcatattgcttaaaaggcccagtctcttaaagctgtttctcgtcatcttaactggaagtactctaattgaatgctcctacgagcgcacaatctcatctgcgatagcaacacgttttcaacactttcatcttcacagatatgttcccaagtcgtctttcccaaaaagtgtgtatcatacagtcagtctctagactacgtagtgtcgaatgtgacatttcgctcttacaaatgattgccgagactcctatggaacgaatgcgacgatgagtattatctctcctaggaggatatacgtttcacaaggtaaattctttgtacagcgagccaaactagggtgccgtggagatatttggtgccatcgatcttttccacatgtgcgccgctctaaaggcaatgagctgttattggttacgcagcttgtgaccatgagataatcctctcgcggaaattacaccagatttaatcctggatggcgttctggttcgagccgccttgggactttgctgcgtctacttcttgatggttgcattggatacccaactgatataaatccctgttcttgtattcataataataagaaccttactaaaataactcaaatatccggtttccacgcgtagtgactgcttgtgtctgacctcagggtcctctccaagaagccctttccatccactctgcaaatgtgctggccctgactccgagatcttcccacgacatgtcatccctaggatccatcgtgccatagcatatcttctcatctggagcaacagatatccactgcatcatctgtctgatatcttcctcataccccttacccacagtggcagccacagtagcaccccactggtctagtgtgatcggatcaaagacggccttgcgggaggtggtatcactgaaaatcttcgcgaactcggcaaaagagagtttgggcccaaccactgggtacgtctttgatgccgtcttttggggacccaagcggaatatttcttggctgtcagtaagtacacaggtcgtctggagagcaagggatgcctcacctgcagcgtatacaccaatatcgtaacttgggtcaacccaatccgctagtctatccgcctcaattggagcacaaaagcggacagtgccatcatctgggttcattcgtcagtcactagtttacttcgcagtaaatgtgaagctcaccttggagttggcaatattgggaccattgcatatttgtgtaaaacagtcctataaatgaataagtagatatcccatttccagacttgtattacataccaggatgtagggcagtgacagccaagagctcatctttggcccattgctcaatcttcgatttgttgtcaaagtgaaagactttcttaaactgccggttgctggcctctgtcaaattcggcaggctactcaacacaatatgttgaactccacaggcctggatagattttcgtttcggtgtcagtccattcttatctataggcccctaggtgtctccataccttggctgcatcaatgatatttcttccggcttcaagctcatgatccatatcctcttctttgtcaatcttatgtccaggcagtcgattgttcgttactgcgaaaactccaaagacctgtttgaatgctttgaacagtgattccttgtcgtatacattggctgccactatctccaacctgtcgtcattttcgaacttcgctctgagtttcgaagcaccagcagaacaggtatctcgagttatagcacggacgtgccagcatggagcagagttcttgagaagtgcttgaaccacgccaccgccctgatttccggtcgctccaagtactgtgatcactttgacatcttcctgtgctgaagacattcttgacaacgctcaatggatatgaaaatatgacagagccgggtaagttaatttgtaaaactgcaaataattaaagacaagacacaacatttatttaatatgtctagagatgacgacactgcggaaaaacgattaagaggcttattccgtatatccgcgcctacagtgagcactaaaacggaaagggaaagtcattgtcggcctaaggatatcaccaatactggtttaacgaatcttctcccctgtctcaatcatttataaaacagttttctgtagtcgcatgcaaagcaatatctcaatcctttggttgcagtcgagactttgtggggtgaggatatctgttggccgcggagccgcggagccgcggccaagccaacatcagtagaaggtacaggatcgaacccctgcaacccattaatgaggggaacaaacagagcgaccccacagaataatgccgtgatcccacttctgctggggaaaaggactataagtcctacgcatcatccgcagatctcaacatggcccacggaatcaccacagaagaatccagtgtcgcaattatgtcctcgaagaatgacaacgatcctgttttatatatcaacgttgaccaagaagagcttcaggtcaaaacatccaagtacctcctcaactatggcaccaagttcaataaagacgttatctgtggcagcaaagggctctacgtgtacacagcctccggacacaaagtgctagattttacatccggacaaatgtcctgcctgctcggccacgggaaccctgagatcgtgcagacactcgccgaccacgcagcctccctagaccacctcttctcaggcatggtatcacccccagtgatcagcctaggcgagcgtttatgcaatcttctgccaaccggcctcgacaaagccttcttcctctccactggcggggaaagcaacgaagccgccataaagatggccaagatatacaccggaaagttcgaaatcgtcggactaggtggtagctggcacggcgtgacagcgcaagcactaggcgcacaataccacttcggtcgcaaaggccaaggccccctgatgccgggcatgctgatgcttccaccaccgaacgcataccgttccatctttcgccgcgctgacggatcctatgactgggaagccgagatggaatacggctggcgcatgatcgacatgcagtcgtgcggatcgctggcagcttgcatcgtggagtgtattcagtcgtcggctggcatgcacgtcctaccaccggggtacctcgccgctctaaagcgggaatgcgaaaagcgcggaatgctcttgattgtcgacgaagcgcagacgggcgtcggccggtgcggggatctaatggctatcaaccacgaaggtgtcgttcctgatatcctcaccctcagcaagacgctaggaaatggcctgccgctcagcgctgttgttacgagtgctgaaatcgagcgcgtgtgcattgagcgggactactgcttctacactactcatgtcaatgatccactgcctgctgctgtgggtgataaagtgcttgagattgtggtgcgtgatgggctggttgagcactctcgtgctatgggtaaagtactccatgaccggctgaatgcactgaagggaaaatatggctgtatcggagatgtccgtggacgcggacttatggcaggagttgagattgttgaggatcgtgggaccaagacccctgcgctggctttaggtaaggcgatcggggaccgggcttacgatttaggcttgtgggccaatctcagtagccatcctagctttgggggtgcctttcgtatcgccccgccaatcactattaccgaggacgagctcattagtggcttggaaatactggaagaagcttttgcaacgacccccggaactatgcctgtatgatggagggtacttctcttcattattgtactgagtttatttattttctttcaatcatcgcatcgcacctttctcacggcctatattctacgagctttacacggtcccatctcccatggatgcctgcctttgaaggcagaatgagcacttgtttgctaggtgcagcctatgaaagggctgcttttgctaggttgatgatcatagtttctcccttctctctctctccctagtagcaataacctacaacactatgctctgccgccgtgtcttacccatctagctagaatcctaatataacgggactagcatgcaaaatagatcatgcgaagactactaaaaacataatcagaaggacccaaagagcagctagaagaactatcagacaagagcaagcaaaagcatcaccgaaaagaccatcaaaaagaccatcaaaaagaccatcaaaaagaccatcaaaaagaccatcaaaaagaccatcaaaaagacatggaatgggcacataacatccatagaaatacaacatgacctcatgcttatctacatatataatgttatatttcctatttgggcttcggccaatgcactttccctcttgtacctgaaccaacaacttttccctttcacgtctcatctccccttcgcatctcgtcccccttttacatttcccatctcatctttccagttacaacagaatgcctgcactagccaatactcctaaggcctggagaagctggtacgaccaactccataagctatgaaaatcggacgatatcagtacaactgaactgaaacaactcattgatgaccctcccctcaattctgaactcaccaaagtcgcggcagaagacatgactcccactgatgtgaacgagtccttttgtcttactgaagagttcacgggcccgaggcatgacagtttgcacgtccactcattctcctccggccagatttcggtacccaaacatcctccattatacttatcaagctaacaagtatatatagaaactccgctggacacgtttaaagggccaactagccccccagggtgtaccgaagctcggtcgcgttgcaaaatacatggactgctgttgatgacctgagaatctaaaggctcgtggattcctggaagatggtccggatgttggtctccaatttgagacctccaggaggaccacgacgatcagccttgttactctctcgtggaagacgtcaccccctgctggcgcccacctgtttgcactgttacacacctttccaatcgaacaataagctccatgctcatttgaaggagtgtgcctcgagacagacagccgccgcggttgatgacgcctcggttgcgtattacgcagcgcacccaccgagtaccgacccggacgcattacccccagatctgcctatcgtaaaatccgacagacttcgcgtcgcccagccaggtatgcaatacaacctcacttgaatgggggccggttacatatcagaacaagctacacaagtgtgtcggcaaagccgactaagtttttcggcgagcgaaatcatatggcctgtcacttggtcgtatttgaggtgaagcagccttgtacgcactacgctgggataaggccaacatgtcgcacccgattgatggccaacgcaacggcaagagacccggaccttccttcatctggcggcaagatcgatatgcccaccgttgccacatggctggtcttccacttttccatccacaattattgggataacctcaagcacgaggctcgcctggctttgtcttacgttcgtctgacggacgaaggcgtgctggggtgccctaacggatggggaatgattttacttcttccggctgaataatgcgggccaatggtcttgtgtctcataccaagtacaccgcgatgtgggtcgccttgtcggccggttttactggccaacccgactattcggacaatggatcccatttcatcgctaaagaactccaatcaaggttcaaatcggttagtaccaaacatcgcacggcaccgcggagatcaccttggtcagtggggctgaccgaacggacggtcaagcaggtccttaattgcctgagagtaatctcagctagatccaccgaagtctatctaaattgggaccaatatttaccaatggtgattcaggccatcaatacccgggttatggatgcgcacggttatagcccggcacagatcatgtttggcttccaaccacgatatgccggtcatacgaacaatacctggacttcgtcaggctacatcaactcgatgcaccggggaacccacctcaatccttgccaacctctacgcttgacaacaccatgccaaatcagcaggatcttgagtcgagccttctaccgccagacctagagcttcagaagggagaaccgttgggggagttgttgactataaaggaggtcaagaagctcactgcgcaagtggtgaacagaaaacgagaccagatcttggaataccgaggctcccaagaacgaaccccttggcctcgtagggaatctagatcccctccctgtcttacagacaacacctatcccacttcgtctaatcaggagttgttggatttgttaagagaggctaaagaattgggactatctcccccatctcacgttcaggaatcttcgatttcaccatctcctccctctctttcttctttttcaacatcatctggatcttctccaactcagccattacctcgaaacgcattttcctcgaaacatacaagtcctgataccagacccccaatcctggcgcccactaccgcactttcaattatctcatctccagtgttcgcagcagccttcgacaaaattattcgcagagcagaaagaactgaaccagcgggatccaccattgtcggaaacccttcgcaagccaaaacagctgaccttacccggatcgcaaggtgcacccatggactcgtatcacgttgaaaaccagactcctcaagttgccatggctcaggcctctggacaggctgtggacatcctggatgccgacgacgacagactatcaaactgggatgagcaagacctgatgtacgaagtccagagtcaagatcagtacaccaacatgatcaaccttccagatggaatcgaatcaatttacccagttgatttaacccggcctatgacggagactctgcaacttgtatacgcaacccagggtggcaagcggccgagagaggaggacagccggactgaaagtcccccacctggtccgctggggagccatcgccaacatcattgcttatatgatagtgcgagggcatgtgactgctgcgtctcctcttcgttcaagtctctcttctacctcttccagggccccaaggattccttcccttaacatcgccgccgtcctggacgagcaggtgtttgctgcccgtcactgagcttggaagttttgctccatcgaatcgctgtgtagtcctatcagttaaccagtatattattattcaagaacagaggagatcgaaattgcgtacgaccattgcggttgaactattgaagtcatacattccctatagaaatcgatggtatcttcaaaacgcaaagaaccaaacaagcttctcgcaaaacgtacaattttgccgacgtggctaatcagaggaccagcctttgtgaaatcagattagtggaaattaaatagattatcatcacacgtacaaatcaggccttgttgattacataagagcatttaaccacctgggcactcggtcaaaagatcacagggacaatcggaacccccgattgtcactgcagcggtatatatactaggcaggtgcagctgacaaggttaacctaacactaccctctgagatcattccaactaaataaataaatattacatgatcacagtcaatggatgacatgcaatttacgatcagaattgatcgatccctgtttcgccatattgatgtttcacgtcacgtccatggaaatccagacactgttccagggctttgttccagacttttggattcatacctttatcgtggctggctactggctgcgttctaattgcgatcatctagctagcagcctattaggaccatctttgagacccgcccacgagagttgatttgtgagtggggataaccctagcccatcattggctctgaatcctcggttgatgcatagcaaccatgctgtcatcagtcatcgcatcacaaaatcgatgtgttgtttctggtaacgcaatcgtggatattgaccaattctgggcgcagagtaaagagtatgtacagaatgggaactatacgttgctgaattccaagaaaattctgattgtcttggaataattcaggaacacgcgataggaaacatggaacggggacgggtagaaagaccagttccaaagaaacaaagttgatttattggaaaagaccatgtggagcacgcggaaccaagatctcatttgcagaagcccagaaatgacccactcgcctaacgcgattggggcttcaggatgtgcttatcgggggatcatcgtgcgtagacttgggaattgagaaatccgaaagttcattgcaaggttttcaaagattttgagctccacagccttaagcatgtccactctaatgggtttgttacatatgagatccaacattccactaactctcgaccatctgcgtcgcacactcctacaatgcgacttggtctgtccgttacccagatcgcaggcgcaagcctaatcgcaggccacttcgcgagcgcattatcgccccgcacggaaatcggcgattcttacgactttgtgattgtgggaggaggtcaagctggactcgtgttgggcgctcgtctttcggaggataaaaatcatactgtgctggttcttgagtcgggcgggaatggagacgagtatcgcacgcgcataggtgcgttcaattattcgaccctgtggagtttttggcgtttctaacgctggtaaagatacaccggcatattcttactttgattcgttatggacaacgcctttgaattgggatttttacaccgttgctcagcctaatgcggacgatcgggagattaattggcctcgtggaaaggtccttggaggtttgtacaagcttcatgatattccaaagagaacaagcagcagaaagttgacacggagatataggcagttccgctatcaatgggttgtacatgacccgtccaggtgaagatgaagtcaatgcctggaaagatatgctcggagatatggacggtgccgataactggtcgtgggaatcgttttatgcagctctgaagaaaagtgaggctttcactcctcccactgacgatgtgattgacgaggctggaatcgtctggaatgcatcacatcatggtaccgacgggccgatccatacaacatacccggactagtatgccgaatcctgtcctctaaaattcgccgataaggctaacgaagtcctagcacattccccgaagtgggcgactggttagcgtcactgcagagtatgggcattgacacctctgccagtatgtacggaggtgaaaatttgggcgctgacgtctcaacctcctgcatcaacccttcaaattggacgcggtcctacagtcggtccggttatctcgatccgcttccagaccggggcaactacgatgtattggcgaatgcgcatgtaactcggctcgttttcgacaattctacatcttccgaaaagaagacagcgagtgctgttgaatacacgactgatagtgggtcgacgaaactgcaggtcaaggtaaacaaggaagtcatcctagcgggtggcactattggcagcccggctgtattgctttacagtggtatcggccccaaggacgtcctctctgaggctggtgttgacctcgtatctgaactccccggtgtcggtcaacatctccaagaccatttcgtaagactgcctcattttcaaagatggacatgcaactgacctagtcacacagagtgccacagttaaatggagtacgaatgtggacaccgcaggttctatctattacagtggcggcaaagacaaggtgcgccctgtgtatcttccttcaaataaccccatgtgctaattcctacagaatgatcccaaattcctgacatacatcgatgacgccgttgcctacgtggatgctagcactatctacggtagtaaagtcgatgagcaccagacggaattcctcgcctcaattgataaatatgcacctaaaacgacttacgatgacggcgtcctcgccggctacaaagcaatctgcaacacgacagcatcgaagatcttcaatagcccgacaggtcaaattgaaatcctatttatgaacagcgatgcaaacggtgacatcggcatcactgctgctctccaacaccctttgagccacggccgaatctacatcaactcctcgaacccaatggacttccctgtcatcgacccgaactacttcgacaacccagctggtatatacccctcaggaatatccaaggaagctttccaatactgacaataacgcagactccgagatcctcctcgcaggtatcaagctcgcccgccagctaggcgaaaccagccccatgagcataagcctcacaagcgaaacatctccaggcccaaccgtccagagcgatgaggactggatagcatggctacgcaaggaagccagcacggagttccacccgtcctcatcgtgcgcgatgctgcccgaagagcagggcggcgtggtcgacgccaatctacgcgtatacggccttaccaatgtgcgcgttgcggatgccagcatcgtccccatttccttgtcgacacacttgatgtcctcgacatacggcgtggctgagcaagcgagcgatatcattcgccgatactacaacttgccagcggagcctgagccggcatttagcgggtcgacttccgcaccttctagcagcgcggctgctgcgaagaagagtggcactcccaagagcaatggcagtcccgctagaaatggcggcgctatgtcgctcatgtggacttctcttattcttgtttttgtacatgttgttgttggcttcggcctgtatatctaggttggtgtttatattcggcgtatggtgattatcatccatgctggttggaaccggctttagcatttatgaagttcaatgtctgcgatttgtttgaaatagcgcgagaaagggacccgggagcttttcattgtgatgatagatatctttctggtacatagtccgaaatcatctcccacatagatacctgactagtacaggtagaatataaagacatccatctattgccgtgtcaaggaaattaacgataactacctcaaatctttgacttcccatctatcgccacgaaagccccatccttccttacctcaaagtccttaccctgctcccatcccacccactccctaagcgtatcaacacccccatccccaggtaaaagtcccccacccgaccaaccaccctgatccgcgggaatcggtgccgcaggcgtattaaccagatgcaccataggcctctgctcatacccatcgtcctcaagctccgcctgctccaaaacaggcgtagcacaagcatcggtgccatcaaaaacagcctcccactccgcgcgcgtcttctccttaaacctcttcgtaaagatctccctcagcaccggccactgctctcgatcctcccttttcggaagctgccccatatcaaaccctagcccgcgcaccaacgccgcataaaactgcggctccaaagccccgacggcgaaataccgcccggcatccttagtttcgtacgtatcatagtacggacacccaccatcaagcaggttctcgccacgcggctccgaccacgcgggagtgttcctccctaaccgcgggaacgtagcaaggtacgccgagccatccaccatatttgcctcgacgacctggccgcgaccagtatgagagcgggagatgagcgcaagtagaattccctggaaacagactgcgccgccgccggcgaagtcgccgaggatgtttcccggggcgtggggcttttcccctgtgcggccgagcatggacagcacgcctgagacggcgatgtagtttatgtcgtggccggccatatctttgtatttcccgtcgcggcggaagccagtcatacgcgcgacgattaggcggggattgtgctttaggaggacttctgttggggagaggccgaggcgttcgagcacgcctgggcggaaggggtcgattaggatgtccgctgctgtgaggaggcggaggaggatgtttagggaggttttatcgcgtaaatcgagtgttatggaggttttattgcgggttagttggtcgccacttatggatttgggtcggtcgatgcggaggactgaggcgccgttgtcggctagcaggagacctgtgaatgggcctggagtggttgttagttgtggtaatgacgtttcttagattgatcgcgtacctggggctaggcctgctagctcaatgactttgattcctttcaatggtgacattttgtcgggttgaacaattgttgaaggtcaggttcgaactgaggttggcatttaatagttctccgcagccgaggtccgtggatatcacagaatgcgggggggattgtgcacaaatataggtaggtaggtattgatcaccacacacttcatcaggcactattatccagctagaaagccgtcatagtatgattttacatggcagcagaataataaaaaatcgtcacatctacgatatatggatatcattcacaagggaaagcaacaatgacatcataggactatagataaatataacggattatcgtattttcgcacaaagagcatctctgtctatcgtatatagtgaaacagcaagcaaaaataaaagaaaacgagtcagactcgtcggcgacaccttggaatggatatcattaggagattgagaacaaacggaggcgaccgcaaaacttcaattcgaagacgcgatgaatcactactggccagagtaaatcacaaaagaggccaagaggtatagaatcactccagggatcggagatcgggtgaaagagaatataatataataaacacagtatcgtaatgaaaagaaaaagcaaccagtcgccagcaatcaccagttcttccttgaagtcaacatcgtgagatcaatcatatcgcatagatgatgagatcatgttgtccaaacaagtggacagtttcacagcatcatgaacatggaaagagcgacggcgagaacgccaccgaagaagccggtcacgttggaacgcgatgcagcaccagtgtagaccggggagacgccctctgggttgctgctgggggctgcgggtgtgttcgtcccggtggtggtgggaacagcagtgcgcgagggcgaggggtggaaaactatgctggatgacggtctgccgacgtggaaacctccggctccattgctgggaatggacttggaagaaggagatggcacctcggggccgacgccaggcactgtaacttcgccggtggagccagagccaggattggaaccggaatcagagtcctcaccgtttccagaagagtcagagccagagccagagccagagccagcaccggggatagcggcagtagcagtgggaactgggatggtcagggtgatggtgctaccagtaggaccacagtggttgcagacagtcacagtggtggtgtatccctcaggcaccgaaggggcggtgggctgcgacacaacctcagaggtagtagtggcagcgggcttggttagggtcacggtagtcggggtagcggcgcactgagtgcagacagtcacggtagtagtccagccttcaggaatggaagcagtggaagtggcagggccagaagtaggagcagtgatctcagcggtgccagttggggtggcagtagcagaggagtcaccagggcagtaggtcttggtaatagtggtggtgatggtggtgaaaccagttgggcaaatatcaatgtaggaggtcacaataatagttgtggtggtacccggagccaaagaggaaggcgaggcagtcacggagggagcggcagtgatacccgccggggcggtggtggagtcgctgccggtgggcttggagcctccggtactgttgtcccctgtaggcttggaacccccagtgctctcatcgctggtagacgggacaccggtcgggatgacaccttcggtagtggaagaggcgccagactcggtcgcggaagagacgggagcagtgctagaggtgtggccggagaccagcggagtagagcttggaacagtgtgggtacgggtatgggtgtgtgtgtgggagccatgtccatggccatggccagggcgcgagctgtgggtgggctttccagtggcggaggggtgtggagtgggataccccgaaggagacgaagcaccaggagtcacagtgctgctaggaacgcttgaagtggaagactggccagaggtggtaggggtgctggaagaggccacggagctggaagaggccacggagctggaagaggccacggagctggaagaggccacggagctggaagaggccacggagctggaagaggccacggagctggaagaggccacggagctggaagaggccacggagctggaagaaaccgaggtgaccgaagttgtagccgagctagacgggggaacagtggaagacgaaacgggagtcgcagtcgaggagtggatcggggtgacagacgaagacgggggagggggaggaggagcgcaatcgtacaggatatccttaatgtgctcggtgtatgttgatccgtcgatgacattgttgtcaccagcggtagcctcccagagcatgacaccaccaaagtgcttggggtgcttgtccatgtaagttttgacaaggggcttcacctccttaggggtcaagtagaatccagcattagcggcatccttggatgcgggaagaccgatgaagagcttggcgttgggattggcgctcttctcgatgacaccgacccagtcatcgaagttgaacttgccggtgccgtggacccagtccgcagcagagcaacccccggtgttgtaccactgaacccagatgaaatcgaagtgcgagttagcaatagcgttgccgagctgcgcatcgggaatagggcactggggagcaccggagatgtagtaggcttgctcggggctcttggtgaagtgccagcgcagacgattgatcatggcagcgtaacctggaatggatgttagagagagcatagtcaggaatttagaggatcagggcaacataccaactccgccattgtactcaatatcaaagtcgaatccatcaacagaggaagtgaggaatgggcgagggaaggccaggccagcgagtttctcagtccaccccaatgaagagatcgctgagttgtaaggaccgaaggagtaccagaggaaatccgcgaaccagactgcggtttcctcgtccgggatagactgggctgtggcagtaccaccaccgatggacagcaggattgtcttgccagcagccttgcaactagggatatcttgccatatctggtggcagccacttagcagctccgtaccagggaagaaggatccatcacactgattggcaaagttggaaccagggaagtcgcccacatgtttggggaactggttgataaacccgatgttgataatgtccgacgtggtctgttcacagaaatgcttgagccggggttggttggcaccttgtccatagtagacagcaacattattcttcagactcgcatcaacggccacagcagatgatgcaaagagtgacagggccgacacggcggcaagggacttgaacatcatggctaaaatgaatgtagtaattaaatgcaataattatacgcaacaagaatcgcttattaacctgatagaaggaatgacaggttaactcgcgaacaacgagaggacgcagacaagtatctgcttgggaattttcccaaagagctcaaaatgagtgtgttgatggtcgaaaggaaatgcaactccctgggggaaaagcagactgaaatacatcgagcgccagctgggactgtccccctccgccccctggggaagattccgacctccgacatagagcgcactaatcagaaaagagaacagagctatcaaaacgtggaaatgaaccagtgcgtgagatccggatgattccacgattcataggtcagtgccactccgactgcactccacctgtgcagggcgacccaacacaaagtcgcggagtggattcaagcttgatagttcgaacgctagactcggagaccatcaggatccgttcacacaagcgatgacgcgaacttgatatggaaactcaatgtagaagcgacatggaccggattttttactgtagcattgccagagaccaaacgcgtggtttaacatggccatacagccagtggcgtaaaagagtcccgttcgagcaaaagctggatcagccatcagccatgacaggcttttctttggggaggggtatgtgctggccccgtgcctattccggcctatctcggcgcagtaaaattgcaagagccgcatggaagaggctaaaagaccctaacggactctagcggcattagtgtcagggtcatgactggagcagaggctgttagcttgatatacaaactccaatcataactcgtgatataggcaccagggcacggacacctcggggtccaccagccatgttatgtagtcggatgcagagcattaagtccgagtgtcggaccacagataaacgtaaggttaaaaaagtggtagtaaagaagatctgtttgacaagcatcaattagaacaaaaataaacaaccttggaagtgagtgtaacgggatacaacaataccaggtgatattgaggtcgaagagtcttagagacttccaaatcgaggagatgggaaccgacggagccaaaagctaataagcctgcgctaagcccttcgggggtaagtgcggagcaggtccattccaggtacgccaatcataggcgccgatccggaaagaagccggatcaccgtttttattcggttacagcaggaacagcaggaacagcatttacggcactttgagattgttgtctcacttgatttctacttgatcgtctttagttcatctgtagttcataattagttcctctaattcgttgccttaacgaactcaagttgagatgtaactctgtgcagggtacggagtactccgtattttgtacacgttctagcccttggcccccaaaactcccacgttacaatttccttttattttccggtttatgcaaggtacaaatttgcttcggagatatgcccactctaagatgatatttagccgacaatgacgccactcatcgcgatgcctgattgctcccctttaatcttggaactgcgcactttacattccccataagcagcccccgcccccagggctccgtgaccaagattaaccgagacaattataagaccttgagatgaaagaaagtcaattccagcctagatgcaggtacagatccagcctaccatgtatatactccgtatcatggatttcatcagcgttgttgtatattaatgatgttgcgtaggcggggaccgtggacgatccctgtggaccgtaattaaaagatcctctctatagccgttccagccctatttacacgaacataacataaagccgaagaacccccgatttcgaaacctaatgcagaaatttgtttacgctgtgttagaaacaatttttgttgttggcaagcgaaatattctacttccggctgtaagggccggtaggcctacggcggtaggccggtcttccgatatgataaatctcgcttccacgctaccaagcttctagcaacagcaacaacaaagataagactatcatcccttttttatacgaagttgaaatggatactaattaaaaatatccataataggaaaaagcaaacaaacgccacccataagccacaagaccgatccagtataagcagtcgagtgggaacgaaattacggagctactcggcatggtcttctgcggaatcttggaaggttcttccggatgataatgatatggatattctaccacacgtcccactgaattctggaaatagatagtgttggttataacgtttaagcacttgatatggctatatacttccggggctgataattcacgagttcaacgaaatacaggttgctcgggaatcagaaatattcaggtcgaagtcatgaataagcagcattttatcaaaatactggatagatatccaagttgcgcggcctcacgcatttatatatccccaaggtccctcccctgagttcaatattacatatgctccaattggagagaacaagaatacatgaacatcgtccctacaattctgctaactccaagtctcgaacagatattcctataccactcattgtaattaggatgcggctctgtgctttcgtcgcatcggcaaatgatatttgctcctacgtgccgtggcgcctcctatcgaacatcatcagcaatagtcataaaaccatgccgtggcatagggggggctcttgtgctgtgtgcagtactgtctggggatatatttcggcggagatcttccggacatttattggggtactagacccttgccatgggatagacagggtacttgctttgcggctatacgaacgccctgagctaagccatgaactaaccatcaacatgcagcctcaagtggagttcgcttagggagacttaacttacagaccgtaaggggttccattattttgagtgtcgtattatgcgagggtccccataatgggccagttaagggggatttctttttcctttttttttttactcatataacatactcaatgaggacaataagaatgggtcaaaggtgcgacggtctaattactacgtcttcctcgccgaaaaacaacggaccctcaaaaccataatatcggacttctcgagtttaagcctccttcacgcgttcgcgctctgcttccgattcaattttccatgtttctgcctcggttattccgattggccagtcccagtctcatccatgatcagatccaccagctcttgaggcaaatttaagcaaaggttccatgatcgccaggacagactctcgcaccatgcatgctgttgtggagggacatttcgagtggaacagatccgataatgcgggccaactagataagggtaatgcatctttgatgaccaggacgggtggcatcttcaagcgagaaaggccggattttgcgtcgaagagtgttgggccaggctaggaatcaaccttgaggtgtggccatagagcctaacctaggtagtcacatgaccttgctgcaacctgcttcagagctcgagccacagcacgagtccgacatgtccctgatgcgacaagtaccagcgagccatggcatcaaacgtcgcgcgtcatcttaaggatgtggaggaagaggctttcattcaagtgaacactctgcttcttgatcatctgaacacgcaagtcaaatcatgcccccctggggatatgaccgacttgctagagcataaggctaaaacatatcctgcactacggaaattgtttcgtgattcttctgtgcagtcagcaaccgaaagctggactgctccgatgacaagagtgtggtcgatgaaagaactgaattccaacttccaaccaatccgacgatcatacgaccactaagtgcaactgcgtcacgggcagcactggaggattctgatgaagatgggccttgtactgatgtacctgccattatcggaggtcttaacagattggtggcaactagtgaggtcatttggcaccttgggtcaactgcagtgctgggtctcaattcggagatcgtgatgaaaatcggcaatgatatcgacataggtcatatccacactctagaatacatcaagcaccatgcaccgcgcgttccaataccagatatacatggtatccttcaacagcctaacagcaaccgcattttcttcctcatgtcacgagcgcctggcgagcccctggattcaaaatgggagtttctaggcgaaaacgagaaatcttcaattagagaacaattggatacgattgtcggttactttcggtttctgcctgctccagtcaccgacgagacccaggctgtccttggtggcggtagtcctcgccggtgcaaagatgcacgacgagaagtccgtgtcgctcaaggatgcattagcaacgagcgccagtttaacgaatttctcacttcccaccctcatcgagctcaagctggtagcatctctatgattaaatcctatctcacggatgatcacaaagtttttctggcccatggtgattttcatccacgaaatatcatggtacttactcgcctaaatgacccggttgcggatggtgccctgcccaaagagtcactctgcaccacaaacggcaccgtcaatcaatcgaccactcgaattaccatcactgggattcttgactgggaaatgtgtggctggtacccggagtactgggaatatgtgaaggccctaaatactattactcccgggagcgatttgggtgactggtgggcttatcttccacagaaaattggtatatggcccagagagcatgcggttgacttgatgctaagcagatggcacggctgagatggtatttcgtttgaataaacattgaattttcaagataatcccggacatggatcgctcggccacgaactctcctgtacttcgtgcgcgctaactagaatatgtgactacccaaagaaggcggtgagatatatcttctactaggcggggcgctgaccgacgaaacttttatataatcctgaaaacaattcgcactccccagatgaaataaatccagacgaatatcatggaattccctgcgccccacattcaccgtgcccaaacctttcacacccatacgattattctgctccatggtcgtggcagcaatggccttgagtttgccgaggagcttttctcatccacaacttctaagggcaagaacctagcctcctgcttacccacctaccgttgggtcttcccaacctcacgtgaccgatggagcactacgttccaagaagatatgtgctcctggtttgatgcctactccctaaacgatatccagaaaagacaggaattgcagaaggacggattgagagagtcaattctgtatattcttgatattctcgaggacgaagctaggctgctagatgggcagcttggtcatatctatcttgggggtattagccaggggatggcaaccgccgtatgggcgttctttgccggaataggaacggggcaggttcaaggaccactaggtggtcttctaggcttttgtggctggttaccatttgcgcagcagctggagggtttgctagaccaatccactcttaatggacctaggatccatcaggcacagcgcctggtatctacattcttctttgatgaaattgccggtcgtgagatgccgcaggctaatcaacctgtggacagctctgtcttatctactcctgtgtttctaagccatggagcagacgatgagtgggtatccgtggaacttggacgacaggcatcccgaattatacggacaatcatggtccgcgttgaatggcatgagttcactggagcagaaggcgaaggtcactggatcaaggagcctgaaggcttcgaccagatccttcaattccttcagacctgatttcccaaactcacgaagggctgccggtggaccgttctgtcaggaatatctgttggcgccaacaaccaaggacaagccccgatagagccctacgttaagtttcagaaagtggcccgctgtacctagtcatgaaaggataattttagttgccgcaaagggaaatgagctagcgcgcgcacttctccgacccctaccttgaagcgcgctaagtaaatataggctgatgtagatcccttgcttccatggatgtagggtgacgaggaccctaacccaacgtaacaaaacaaaacaggagggaggggaagggccccggggatattactagtatgacacctaagcgactgtccaaagcataaaatcgtggctgtgatgcttcgtgtggaaggtatatatattcatggagaaggacggcagtgaaatgcttgtaagtttaaggttttcccgaggtcacctccagggctactagaaggtgactaactgccactatggaaacccgtaggcgactacgggcacactctcatacttgctgttggcccttgtaactactttatgcatgtccaactctagccgcagttcttatcataccattcccatcgcattctcaaccccccatcacaagacttggaacatactataacaccattcgaagctgcggacctatacctacaaatgtgggaggtacaaactaccttagtattgttaaggccaaataaatgtgttataactagccctgatttattcgggaaccatgtgctcaatttaaagtgttatcgggaaagcgggacttcgacatcccatagcgaaatgctagtatatatatacatatttctctggtcaaaggttttctctaaattcctggtgctggatgtctccaatctcctcatactcatgtcatctagataggatagacgaagaacgggttctccatgtccgtcaaatccaacatggcaatttcaacctccctgcgtatcatgctcccagtttcatcaagctcctcaacgactcctaattcatgagtctttctctcttcgctggtcaaggattcagcccaagccttccgctgggcgttcctacgtttcaacaggaaccgtataatcaaaagaatcaacggtgtccccacccagctgaccactatcatggaaatccaggcaccgtaatagcgaggtgcgtccctaggaacccatatctgcggtgagcaaatatttgcgatggaatagccgaccatgaacatgacatttcgggtcagctttttcgtgtagccggctgcagatgatgtagtccaacccagcgcgataatgtaggtattaccataggtgtgaccagccagcagcagacacgcaagcattcctagcttctggtcccaatcaatagcaaccatcccaattccacctgcaattgcagggatacaccagaaaagtccgtggaaggcaagatttgatggccaccaccgcagggcgtaggctcccgcaagacaaaccaggacaccaaatccgccgccagctgcagccacgagagtcgagcccaagctgtctaccccaagagctttagtaataaggttctgctgtccgtaggtgagattgttagacatcatcaaggtgaatgactgcagagtaaaaagccatgaaatggggtcacggagcgtctctctaaactggctcttcttgaactgcttctgttcaatagaactttgacttgactcgtgtactcgtttgattgtgtggattctctcttccagtgacaggaacgtagcctccgctgggttgctcggatactgaaaccagacaagaacagaaagaaggatcgagacaccccccgtaataatcatgaacagcttccagggcaggatggtgctatggctccaaagcaaaccgtaggagataaacgcggcgcatataggggcggcggcggatgtcaaccaaaggaagggttggaggaaggattgctcgtaacgattaaagaacattcctattgtgacttccattgcaggtacaaccacagactcagcagcaccgagcgccagtcgcaaaaccacaagagcggcgtaggtcgtggcgacacaatgaagtagtaggatgacaccccacatgaagactagagcggcaacaaattttccaaatggtagtttttgcatagcatagtgtcccggccattgcgccacaatgtagcctacgagagtgttagggaatatgaaataggagaaaaatactgtcacgtaccgacatagaagaaagttccaagattgttgtattgagccttggtgatgccagtttcttcgaacaggccgaggatagcggcatagccgagagtggacttgtctatctaggaaagttagagcctgcgagtaagaggtgttaatgacaaactcacaaagagcagcaggttgatagcggagagtagcccgaaaatacgccagtacaatttgcgtctcagcgttttctccttctcggtcgtcaatgaaccaacagagtctccatgaagctgaagaatgcgaagagtttcatcagcatatttggtgtcaatagctctctcgttcttaggtgattgactctctatagccataggctcagcctgaaatgtcaaatccatacgtgcgagcaactcgtttcgagccggcaataaaaagaggcctgcgccgtcgactcaagactttgaatgggtaggaaaattagaaaagagaaataaataggtcttgagttatctgccatagatttggggtactctagaatttcatcacgccataatttagataaaaacgtatccctcgttctcggctttagaaataggatcgatcaatacaagacgatcataattgccattgcaaagacgccaaggcacacatgagccccaaattatttgcgttaggacacggtcattttttttaaatagcaacggttcgacaaagggggatgtgaagtaaggagacaagaatgagcaaggttattcgccttaggcatatagctgcctcaggcaataaactctaaatgggccatgtggggccgattcccgggccgattcccgtcgtccgccaaccttggaacctgattactactcgtcaaatccgaagggccctggcctatattgttatcttaggacacccagatccagagacccagaatcggttctacatcagtgctagccctccttttggggtatctcgttcaacttcacacctggccatccgtccgagtgaaacaccctggactcaaagtctaacgatctcttacaggcgccgctcagactcatcccaacaacaaaggacgtgatagaggacaaaacttctaatctcctatagcctgcgttgattgtattctcttttaccaattggctaataacagaaaatatttactagggacttctaaagtctgagattgcgcagggataagatcgaaattccaagccagtgcgagagaccagggctgttattatgccattgtcaagtgtgtagctctcctcttaactttggccataataagtggatgtgtcctctttggtaggaggtgatgtagctggatctgctgtctgtgaaataaagcattgttgaataccgatggacagtatcaaggcgagatggaacttctatacatagcctcaacacagggcatgaagtggggtatgagggctactgggggataatactcattggcaccagatacgaggacgaagaactaccggccttgagtgcacaatgaactcagcttctgacttgcatggcggattggatcatagcagaccactagcttatcagtgcacagccgcagtcatcctatctataattttatcagtccatggaatatcaagtccggatagatttcaaataggccaatcatcgcagggcgatcttaccaattgggcctctgcgacatagacgacctcagaaggtatccacgcattacttctgtcttttaactcatactcaatggcctgtctattctacaccaacgtagcccttatgggaagaatgaaaagaagagtaaattgttccattgttctatctatgtactgtatacaaacacaatgtctacatactcatggttcaacatcatcggatcacatctttcatagtatcaccaatagcctcagcacctccgccaccacccagcaacccctcgttcgtcgcctgaataagaacacgccgataagtaattagcgccggcgacccgttatccttcacttccaaaataagatgcaacaactgccccctcgcaacaggcttacgactaataagctccacacagcacttctcagccggcgggactgtaacctcaaccacacttccagcctcatccaaaagccgaatccccaactccccaacctcatgctgaacagaccactgtgtcgcactaggatccttgtactgataccacttaaacgtaatagaatcctccgggtccgggtcatacgatgcccgcgcatcaatccgcaccatacccccagccggcacttcgagaaccagcggcgcaggcccaacactcccattaacaacagcaacagggtgatgattcgcgcgcgccacatcccgagaaagactccactgcatgcgcgccgcgaaatcattctggaacgcgtcccgccagcgccacactgtcgcctggttcgacttgtgccggcgcccatcatgcccaacgacctcatctggcgtatcgctgaaatgtctattcgcaacgcctgccccgctcatgtccgtgcggatatatcgaccaccccaggacccgtactccgggctctcggcgacaccgagcccgttttggatcaggtacaggaacgtcggcgtgtcgccttctgggatgaacatgaaatccgggtattttgagcccagggccccgatctggatatgttctcggatccattctgcgctgatcttcgacccatctggtccgccctggtcgaagccgtaccatgcgtcgccggagatcccggtccatgcagccagtccgtactggcaccacccgtgtatggagcagatgtagaatagatctgggtaggtagcgcgcagccaggttcctgtgtcgtcttggtcggagattgcgtagatgcggaggttcgcgcggtgggtggcggctgtggtgggggaatgtgtggtttgtagtttgagaagtgcggatgcgagcacgttcgtgccgccccagcagaggatccagaggggatcgttggttggagtgaggatgcagtctagcagatgctgtgcgccttcgcttagggggatgtctgggcccacggcggtcatgccgtagctctatttgattgttaggatgtggtttggcggggagggtatgatgctggacggtacctctgcgccctttctgatgagcgatcgcatatattgggctgctggatatgggtcgtttgggtggacgtgggcattgagattgtctacgactttctcgtagccgtctattatcttgtgcatgtcctgcggacagaccttgttcttcatccaggttgaagtgcaagctaccaggccttcagtacggaactggttggcatacaataggtagcgaaccagtgactcagcatcgtcgggctcattggagatatcgctcaggatgaagacgcgcggtttggacgggaaagactggagttggtgctgcgatgccattgtcaatggtgatgatgatggctatgggaataaatgtacgaatatgttaacaaaaggaacaacagaattacaacttacgaacagaagacaccatatttggacaccactcacaaggacaaccctgaatccaattatagccactcgcatatacctaggtacatagttcggctggcgtccgagtgcggagaacccgggggaaactgccgaagtttagccggcaacactttccaaacccagtcgtaaccaccacaacggactagcccccgatgaactctctcccaagtttggttagtcgtttgcttcttcgctctgacagggaaatgcaagcgcagcatttgcagttccccccacaagaacaaccgagaatcgcaattatagccactcgtacctggcttagctgcgtgctattgcggagaagccgggggattgcccgggttcagtcaacaacacctccaaaccagcagttctaaccgccagcacagactatcctccgatgagctctgcaccaagtttggtctttagcttcgtctcattgacggggaaaagacaagcgggcatttgcagtgcccgacatcaggccatctcttgcggggctgcatctgggataatgttccccggaaaggacttgatggcgttggtcaaaacctaggtatgtatataaaagagtgggtgacacatgccggggggctgcgagtcctctttgtcgacggagtgtgtgcagtaaggtcgttgctggttcttatcaattcgtcattatgtttggcgccataaaacattccgcgctctaccaggagcttagccttcgccttctattcgttggatgtttcgtctccctgggagcgattggcttcggcttcgataattcctggtggggaggagctctggggttgacgccatttgcccggaagtatgggtctcgcaatgcctccggtgattggagtattccccctgagaagcagtctgccggtacgggcactggctcggctgggattatcttcggctgtctagcttcgccatggctgtgctcgcatctgggccggaaacccacgcttctggtgatggctgctctgctttccatcggaattgtcctcgaggcctctgctgtgacgtcgttctggcagttggtagtgggtcgcattattgtgtactcgggcattggcgtggcatctaacgtcgtgccgatgtaccagtcggaatgtgctcctgctaggatccgaggtatgtggtgttcaatataattacaaggaatgggcaatggttgttttgactctacttcccaggcgctttcttggcggcatactcattctggaatacattcggcggcttcctcgccaccctagtcgttttcttatgtcagaacatgaaaggcgaatgggcgtatttgtatgcatcggaagcccactccaactgtccagtatctggctaacccatttgaagaacagtaatcctatgccagctcctggtccccgttggaataatcatcccatacccctttctccccgaaacaccccgcttccttgtctacaaagggcgctacgaagaagcagaggctgcagtcaaggatttatacggacccaattacaatgcgagcgaggaggtccagctcctccgactccaagtcgaggaacagcgcgagctccaccacgcaacgagcatcatggactgcttccgcgggactaaccggcgccgaactatcatcgccatgggcgtccagatcctgcaacaggcgcaaggtgtctcatttatcaataattttatcgtgacattcatgaagcagctggggttcgcggacccgctgcaatacaacgtcatcgtgctagcatgcgggatcgttgcgaatttagtctctttattcacatttgacaagcttggtagacggagcagcatgtttgtcggcgcgttcttcatggctgccatgatgattggggttggcggaactacggcgaatggctacgaggttctatctccagtgacgcagaacgggtgtattgccatgcttgttctgtggtatgttttctatgcgctgtcctggggtcctggtgtgtggattctcggcggcgagattggaaccggacagctgcgcgagcggacacttctcttgtcgtcccttggcagtttcgttacctcggtgcctatcaactttgtcaatccgtacgtgcaggctgcaattgggggccggacggcgattatctatggaagtttctctgttgctgctatggtctttgtttatttctttttgccggagaccaaggatcggtcccttgaggaacttgatgagatgttccagcacaaggtggcgacaaggaagtttaaggattatgtttgtaccggcctgggtgctcagattaggcaactggaggatgaggaggatgaggcccgttcgaaatgtcggcagattgaacacgttgaggttgcgtagattgttggttggtttgcttatattaaactggcggggcgtatgaaccacaacagcaaacgtattggacaaattcatgtcaaatcgtgttgaatttcacattgagagtaaagattcgctgcataaataacaaccgggcatactatcttccactgtgttgttttattggagccacttctgattgtcatataactaaggacgtagataatacgattcacataacagtattgttgtcttacctgttattctcaatcgtagaaaggtgtatttgtagtagaagtcatatcatcattccttaaattttctctatgaaactgaaggaagcaaaaggcagctcagagaacagcaatgcactcaatctcgacatcagtattaagagggagcgttttgaccgcaacacacctgccgagtataaccgttagcaacgaatcaaaccacttatgcagacccgcgcagatgcatgcgtaagcgcaatcagtacattgcatagtacgaaaagaatcgagggaagtatatgaccccaaatgaccccaacgataagaaataaatgagcgggggtaagaactcacgtccggcagggcttcacatcaccccagtactgcatgtagacggagttcatatccgcgaaatcatccatgttggacaggaacacattgaccttgacgaccttgtcgatgttggtaccagcctcctcgaggatgtgggttaggttcttgatgcattggtgctgttcgagggcagaggtattagcaggttgaattggttcaattggggttgacctgtctcttacagtgtgggccttgacatcaccatcaatcaactttccagtggcagcgtccatcgggacagcaccggagcagtagacgacgccattggcgacaatagcctgagagtagatcccggggaggggcttgggagccttgtctgtaaggacgggggtcttggaggacattgtgagagtttctgaaaggatggagtataggctagggatgagtcaattgaggtgaagtgatgaaaaaaaaaacgcaggaattgccccccttgcgtgggggaggcgctccttatcaaccgggcagcatcaggggctatggctgcatcccacacggtcaatactaaaacgtaacaactggctctatattggccgatggcatatagccgaggaacatgaagtgactcacgagtggcttcacgagaggccccatgggtccatagaactccataatggagccgacggggggtctcactgcaacagtcctgtcgatcatttcccaaaaccggcatatagttggcttatcagcttatcagcggtatttcccccgcattgcttggatggttctccccactttccgcgtgggggtgaacttttatttgaatgggaccctgggaccccgaaagtttaggacccttgtacaacatatcttttccttattatctgtaacttcaaaatgactgcaggcgttactcaaccaccttatccgctccacgagtccgttaaagacttgttggaccccgagtatgtcgcattctataacaagcatgtcatcaataaccaacaggtgcacctgcagcccgtggaagcatcacggacaagtggtgtcttaattccgggtgcaggcccaatgctggaggtgggcaagactgaagacattaccgttcagcgacgagcaaccaagggcccagcagttcccatccgctgctttactcccaagggccaggcgcctcctggtggatggccagtgatgctgtatttccacggtggtggctgggtactgggcaacattgacacggagaacgtggtgtgctcaaatctctgtgtacgaggcaactgcgtcgtaatcacagtcgactaccggtgagtgaagaattatccgtggactatgtgatcacaccatgcatatatgaccttgagaaatttcaatctaatgtctcttattttcttctagccttgcacccgagaaccgctggccggctgcagtccatgactgctgggaagctctcctctggctgatttccgacggccctgccgcactctcagtggacgtatccaaaatcgcaaccggaggctcctccgccggcgggaaccttgccgcgattttgacacacaaggcgctgactctgtcaccgcccgttcacttccgagcccagctactgtctgttcccgtgacagacaacactgccacagtggaaaacaacgagtcatatcgtcggtacgaacggacacccgcacttccggcacttaagatgtactggtaccgcgatcactatgtccccaacgacgcggaccgcacgaaccccgagtcaagcccgctgttctggcagggcgattactcgcaattgccgcctgcactggttatggttggcgagctggatgtactgcgtacggagggtgagcagtatgcggagaagttgcagaaggcgggtgtgccggttgatttgcaggtcatgaagggcatgccgcatccgtttttggctatggatggggccttgactgagggaaagaggtgtatcaccttaatgtgtgatgctcttcaaaaggccttctggacctgattgaatgtctaatataaatgtcctcctgaatacattcccgattggggacccacttattcgagcatgtcgaacaaaaggggacgcaagagggcgcgactcatgtatctatctgatattcatctgcgcctgtatgcctcgggacctgtggccagatagtttgaactggttctaattctgtttgcctagtttgtagtttattccgactgcttccattcgtcaacttctgcgttctcttgtccctttctttactttaaaatggcgactatggaattgcaaaactgtctatattcatgtttacttaatagagtgagcaggaaggaaagggtggcgataggtgagagacagcagcaaactgtgaatcacctgatcccattaataaaggcttggggccataacaaacagatggggttggcgaagaaaggaaagaatgaagaaacaaatgaaggagaagagaaagaatgaagaagacaaatgaagaagacgagaaagaaagaacggatcaagacaatcctgtacaagggaacagaaatagggacatgaacagaaacggaaataaaaaccactttcaacaaagttgtagagtgtatatactctggcccaagggcccgaacgtgtatccacattcctgcaaggcattacttagtcttcttcccttttggcacacgggcaagccagtagataaacaccgcgccgaaaatattgacgacgatgtacacccacatcagaccgaagttccgccaagcgtcagcgaagtcgctggagatttgcaggaggtaggcatcggtcttgctcaccgtgcaaaacaagcagtctgtggtagctaggggatcttccagatatccagtcccggcaattttgatataaggatccatatagtcctggcaagtttggttggctggggggttaaacttcaggaattcgactggctcgcagattgcatcggcgcccgaaacacccgtcgaaagcatcgctgagaccaagtaggtaaacggtgaaacgcggtacatgaagatccaaaatccaggcaaggcctccttagttgagagaacaccgcagaagatcaaacagagggagaacagcaaggtcgcgatgttgccaccagtctcagccagttcaatccctgcaatcaccatatgtgcgaaggttgaagtaaacaacaggaatgtccagatcaacaagaacatgagggcccctcgttcgctcactgcatcgctgggctctgcatttctgtacaatccgatcggataataccaacacaaaaagataaacacagccataagtgtattccaaggcaattccactagaatgttcgagatcatgaacgccctccaactgtatgtcttggatggacgctctcgcacctcgtaaagagagcgttgggtaacgaagtttggcatgatctgctgcaccagatttccaaaaattgtcatcaacatgaagacactgaacatctggttctggaggccttggatagaattctgggcgtggaaaaacgagaatccaatatagagcgacgtgaggatgcaaagggcagctttcgaccagatataagtcggggttcgaaagtattgcgcaaagacacgtaggagacactcccatagctggacgtaaaagggcgcggcaaattcacggaattgactaggcgaagaatcaccttgtgagtttgaagacaaggtggacttcagctcagacagatgctccttgaccttcgcgtactcgggactagcccgccatacctttggccactcaatctcgctgtgtgtacccggtgctgccccaataacgtccaacatccattcagcggggttctctccgggggtcaggtggtgggcgccgttacgttggaaatagtttgacaaagtggacgagttttcgccaatctcaccaaagtagattgtttttcccccttttgccaagaagagaagacggtcaaatcgttggaacaacatcgctgaaggttgatggatagtgcagagaatcgcctgtccgtgcttggtgagagtgtcgataaggtcaagaatagaccaagaagtctgactatccaggccactcgtaggttcatccaggaagagtaggagctggggtttcgcggcaagctccacaccaatcgtcaatctcttccgctgctcaacgttcaatccctcgcccggaacaccgacaacagcgtcagcgtacgcctccataccaaggagcttgataacctcgtcagcatagtctatcttttccttccggctaacagaggcgggttgacgtagcaaagcactaaactctagtgcttcccgaaccgtcgacgtagacaagtgcaagtcctgctgttggacatatccggtctttcgctggaaggactgatctgtggggtttccgtcaacgagcatttcgccactgacaacccccattgtaactcgcgttgctagcacgtcaagcagtgttgtttttccagccccggaaacacccatcaaggccgtacaggtcccgggcttgacccagccgtcaacattgtccagaatccttctaggctctcctttaattttgatgtcgtaacagacatcctgccagtggaagatcgcagtttgtcgctgaatggccgccgctttgggaggagactcgtccgttttgacgcctgtagaagattgagaaggtgcctccacatcactagaggcatgtttgggctgatagccacggcggaatagaaggacctcgcctttagaccttttctcggatatgtactcagtggcaagaagataggtgagcatgaagaatataaggaagccaaagagaattccaagatttctccacaaatgtcccttaagatacccgaagctctggctgagatacaacgatccagacacattggtggaccctgactgagcaccgacagttgaacagatgcgatggtccattgagacactgtcgtattgaccacctgatggaacgacagctgcacattcaaaataacgatcgtggaattcattgaccatgaaactttcaaaggcgtaggcaacgggattgatatagttcatccagcgcgaccacccgagcatattgcgagtgggaataacgaacccagtgtagataaccatacccaagatcaaaatggcagctggcactaaggcttgtgacagggatctagaagatgccgcaattgttctgaatatcattgacattgtgaacgtggtgatgaccgaaaacagccaaaatgtaaagaacgccccagcctcgcgacgtagatcggtcatgaagtataatggtatgttgaaggtcaatgagttgatcagtttgtaaggtgtatcgcagagcatcgatgcaagtgcctctgcgaaagggtggtagaaggcgtatcgggcttgcttctcaacaattggacgttgggcgtatagggtgaggatttccagtgcgctagaaaaagcattcaggaggaccgcaaaaaacaaaagagctccacgagagtagaagctggaggtatctttggggagattcacaaacaccgagccaatgatcaaagacattatgaaattcccaatcaaagctgttgcagttaggctgtagtctccacgaaggcgctgaaacccacgggtcacacagagtgaaatttgtttccgtatcgaaatggtgtatggcgatttgactctttggtgcttgtcctggatagccttacgggcatcgataaatgcatcgtaggagctacctttgagagggtaatttctctcatactcctcaatttcaaggatgagcttggcacgtgcgtcgctgttcttccatactgtcgcaaattcatcaggagtgcgaggaacaaaacgggtttcaaacccactccgcaccacgcgttccgaagggctggtgatcgacgtcaagaagtctgccgtggtttgacgctccgggcattcatagcccatgtcttcaaagtacttcctagcctccgtcgttggcccaaagtagatctgccttccttcataaagcaaggtcaccttgtcgaagacatcgtaagcgttctgtgacgcttggtagatcgcaacgcaggctgttgttcccgagtatttgctcataagagccaggtttcggcaaaactcaagtgcattcgcactatccaggcctcttgtgctgttgtcccagcactgcaacggactctgactgagagtggcctctgcaatactgacgcgtttcctctcgcctccactaactccgcgaatgaagtcattgccaacccgggtgttgatcgtatgagaaaggccaagcatggccatcaccacatctctcatatgttcagcgtattgcttgtttcccacaccctcaaggcggtttcggggagctctagctaacgccgcgaacatgagagtatcgccaacggatagttgggggaagtggacatccgtttctgctgcgtagattgcctctcccttgaaggaattctgcatgtcctttgcagagatacctaaatgcattgcgtatttgtcaaaaccttttcaaaaaatgaagttatacagaatcatgtaggaagagacttaccctgataattgagaaccgaatcctctgacatctcaataccattcatttcgccagcaatggttttgagtaacgtcgaacacccactacctggctttcccaagaccaccaatgtttccccacttttgacgagaccatcgaaatcacggaggatctggatcttctgaagcttcaggccggcgagtcggcggaccatagttccaagctccagaaccgagttcatgacgtctttttgatagtcggtgggagagccaaatccatggacgttcaaatttttgaacgaaataccagcggtccgatctgggtatttgtcggggttgcgagaccggatagccagcaacatcttcatccagtcccgcaccttgaagttggggctattgggattaagagtggattcagagtctccattggtgaacggattgttcaatgtaccgttcacagagaatcgggtagattgacgggtgagttgtcgtgctagctgaccaaccagtgcttccctgtgttcttcttcctcctgcacagtgtcttcatcctcgctcttttctggatcatggatcatgtcgagctcgtgtccacccgagagttgcattgaattgtggctgaccatcgactgggatcgagtgagatttcagttgggtatcccttagagtgatgagttgggttcgagatctacctttcgagtccctggtgacataggcttaggcaggactgttgtattgctgcgtgcttgcttgagagagaagaggaagacaagacgaaaattagagtgataggaggctgagatatctggcgacgaacgatatatatcctagtcgacgacaacaaaccgcaagcctgggagctcggcatatataagtttgtctctaaatccaaacagaaaatcccaattagatttccggcagatccggccagtttaagggtcattatcttttgtgaatacatatctagccgtgatagaagaacctccgggatgccgagatatattggcattttcaatcattaaatccgtagctatgtacatacgtaggaatgctagctatcggattttggtcttctacttccggatcccggaacggggcttatgataccccagttttcttttttccgaactataaccgtcagggctctactccgtgaaaagagtcgagaagtcgaaattgagtgtcgggttagggccgggggcttggcatgtctcaatacgcggtattaccaattaaagaacatccggcatccgatttagccacacagtgttcactaatgtggtattcattacaagacagcgtttcttgggcgatctttttccatcattagctcaaccttgagatgttcaaaggttatacatagaagaatcgctttcacaaactaagtttccttccgtcctgtttctgctgtctaaaaagaaaaacgagaagggggaagaaaatctctaaccaggcatctgaaaagcccactaaaaagacatataaaaagactattggagaagaccactgttaagaataccttgtaggtgtgagtgactcatctgatatggtatcggacttaaagaggttcgcaatttgcacaatttgcataatttgcacggttcaccagcataattatatgcaggttatccacctgggcacctcctggacccttcgctgtctttttcattctggttcggatggagcatctttgtgatatacgctaatgacttcgactctgtagctctaatttcagaaacgactcctatacctggttttacaactcgtgaacatccagaatgaatagagtgttcgacaatcaagctcacggcggctctgcattgatccaacatctacctcaactctcaaggccagaacatgggcgcctgataaaaaggaagcggaagagaaaagtgcggactccacagacacaaataaagtcatgtactaataatatcattaggcatgcgagacttgtcgacgcaggaaaataaaatgcgagattatcaaccagtccaaatgctcgttctgcagcaaagccaacgtaccttgttctctagttgatccaaggcgtcataggcagttgaagaagtaccacatcccagccaatattatttgccagtaatgaataacaatcgaacagcctgagcatgatcgatcgcctagagacaaatatccggcgcttggaatctcattttcagaagatcgggtttcacctgggtgaagatgagaacgagccatcctttatcgagggatctgagcagtcagatgaatcctcaccctcgagtgcagctgaaaatgcagattcaataaatggcacgggcgcttgggactcagaaccaatacacatggacgctcaacaagacccctctgctgctccacagaatgtatatcccaccatgctcaaaaaagccccggatgacatccacacagtaataccggaggatctgccctgcttctacgttccaaggtgttttacggatgcaccgaaccccggtaagataccatagctgattccattactgccaaaagctgattgatacgtataggcttctcagccctatcccccgaagggaagaaatggataactaataaaactcaagggggttccgttggcaacttagaatccctccttccattaggtctccaccagggaacgagtcaaaggctgcttgagggcttattccctgacaaacatttctgtccattgcccccgaaagatgagattatatcgttggtcaatgactacctgcagcagttcaactcgttgattccaatattccaaccgtcatcgctactgtcactttgtgaagacgacaacttacagagcatattcgattcgcccggtcgttgggcgagcctcaatgttgctttagcgatggggtatatgctgcgcatagagaataactcttctgtacatagtgaccgtcagaagggctggttgttcatgaagaacgccttgggggttttgaatggtctctgcttcgggttacctgatctatgggccgtccaggcgctgttagggatggtaagatgaacagcggccttgacagaagatccgactaacagtactttctgtataggttgtctttctaatggggacattgagcagccagccttgcggttacttgatttcctcggttgtgcggatatgtcatcagattcgacttgaacgcagtgaaaacgagtctggcttgtgtcctgaagaagtagaacaacggaggcggattttttggattgcgtactgtcttgacaaagagtaggggacacgctagtattgtcagatcgactttatactgacctgccctaggatatcccttcgtgctggtattccaatcgcgcaacgcgacgatgacatggacgtcttattaccaacggaaattccactggataacatagggatcatgccaacaacagaccgacaagagaccttcaacgtactcagatcaacctgtgaactggccttaatcaagagccaggtacacaaacacctctactcggtcgcagcgcgagatcgcccgcttgttgaagtggctggctcggttgccatgttggacgaaaagctccaacagtggaaggagagtattcccaccgagttccgacctgaaccaagaagggtttccacttttccacagtccccggtagccgtggtccttctttatctccatttatcatacttcaactgtctgatcgccatccatcggatcaccgcagcccaggagtcaaggctaggtatagatctggtcaaaaagagcagtgtctacactctgcccaatcaagtgatatttatgtcggaatcactgtgcacgaaagctgcaacagcgtcgattaacttgatcaaatatatgccgaaatttaacatcaccctcgttgggtacgtgatgacttggactcaaatacgtttgtccttttgcttccttgttctgtggctaatctgcaaaagggtcatgatctactaccctatttttgcatccaaaacactgtcctcgaccatcgtccggaatccgcgagacgcctcgcgcacatatcacatcgggcttatcatgcaagtggaaacatttgtgtcatccttggcccttggtaaacccaatgaagggatcgagggacttttaaaggactgcgccgagtatcgctccctggcggaggctgcagttaagaaggcttcacagatatgttggggtcgtagggggttctatgtttcttaacagcgcagtggaagatagtacgccgctcactatttacataataagtaccggatttagcctagctactactccagagaccactgaaaggtatcacagtcgaactctacaagggatgagacgtactaggggtcggtgacagtggtgcgaccgaagcccgagacctcgaatgcggtagtttggtaagcctacctatgagtcccagaaggaccagccattccacgctgtcacctccaacttcgtattataagcacgggaatatgaaaatgaggaattagagctgctggaagtaaaggggtcgtagattcaaggcaaacgccttccttaccctgaacttcctgctcctcgttcgttggtgtcttcggctcttcaccctattaatatcaccatggttacgtccttcccctaccacaacggcctgacatgtccggagatgtaaataaccatttttcctcattggttgaagcgcggtatcgagatggacagtcagcaaaccgcttgcttccgcgtcatcactagagacagttctgaaacacagctcttgtcggtcatttctgtccactccgatcccccaaggcactctgctcaatgtcctccatgtttcagacttggaacgttatctgtatccaagaaccggagcacaagagcgcatccgcaagacctgctggagacctggacttcatacgcgaaattattgaccaggggaaggtagtagcatttggaccagaaggctatgagcaagaggtcgagaatgctcggaggggaggtcaaggaggcccatgatacgtttcaaacgttgagcgggcaaaaagtgaacttgttgggcgggaaatggtatcgcgtcaggactggcgactagaatcatatctggagataagatacctcaatatccgtatatcttgttatactaacatccattagccgtcgccgatggtgtgtctcttgcacgatcaggtagcagcatatttccccaatgttgggattgttgccttccggcgtagaggctaaggaggggcatttagtttctcaagctcattagcatagtatcccatcaccatgtatagcaaagcctttcatttcggagggtggaagtagtcccagtcttttgaatagtatagaggaattcgcgtttgtagaaactcgcaacagagtatctggagatgatacatttctattccacctgcaactatcgtcagaggaaattttgaagaaacaagatagggattttacgctcttcgcttgattttccaccttccaaatgcaacaaggcaaacgccagagatcatactgctatactcagttcacagttagaccagagcattccacgatgtgaaaccatcagaaacacttcattcatgtgtcaaatgcgtcagaatgcttgtgaatccaggttcaaggctcatttctcgtccttactgacaaggtgcaccccccctcggatcacgtgtgtacagagttggtaggaactacccaaagccataaacttggaggctattaacacgaaattgaaataaaaaagagtcgtttgagtcgtttaaataagtgtataggtttaattgaaagatcgaaaggattcgtgttgatggtcggagtggttgtggttgaccacgtcacgtcatcgagggatctactcctggatagggcatcgcctccatcctatcttgaccaaggacaacccttcgatgcacgggcaattaattacactgaattcttagaagtttcattgcacttcaaatcttccaaatcttccattctcaactgaaacgaactgacgtctgtacaggcaaatccacagggataaggctgacaacaaccaaaccctcaatacatccctggcactagcaagtgcttagcattccaagttatcaagctaagatggactacccaggtacttccgtgcccgtgggctctctacagagagggccctcctcaaggcgttggattctttccatgcatccccctcggctgctacattccacccctccacgctatattcgcgtcgacgcgctccagggctaatagcccttcatcaaagtcctctttagtccatcaccactcctcttggtatcgaccttatgtatgctattatttgcgcccaattgatgaatttcgagtgagaccacaactgggctcgatttggacccggtgcatgtcctttacatacaacacactcgcattcttccctacccgtttcccaagtctcaggcagttcggagaagaccataaaagagtcgttcgtctcttggtccttgagctttcgcaatcatggcatctggattttcacctacgcctcgaaaggagggtacatggacgaagcttgtgatatttgttgcgctatacttgctgctcctcgagtccatgttggaatgggtgctcgtactctacctttacggtaatggccaggttgactcaaagatgactctcagtgttgtacttgcacttgtcgctgtacgtttgatttagccctttggttattatacagttcgctaactcttatccagtcttttctctcagtgccgcttgtcagcctccaaagcctggtcgcttggcaatacaacaatattggtggatttggaacccggaagaccattctgcataatatatgcacatatgtgctgcgcttggatcttatgctttggttagctacaagtgtggctggtctcgtggtcgctgcacagcaggtgtactgtctcccggaagggacagacgcaaccttctggagagtcggtaaaagctgtgccttccaccgagcgtcggtgatcgtgtcggtggtttcgatgtatgctcgacttttgttccatggattcttcatttgaactgacaattcttctacagggtcactgtgtgcactatgtactgtgcaaaggagctttgcgatagaccatatgatgtatcgcttcttggtatctacaagcgccagaaagttagcagagatggcagtatcggctctggtaatagctgggatagcgaggaaacgctcaaaaacgaaattctctatctttgccgccaacacgacggaactggagccggggagttctggtctgtggacccaattgccaacagagtcaactgccaccccagcgtccgacaccctgccccagcccgtctgcggcctcaacttcgagtcaacactgatcctggttcgacatatggagaaattatgcctggaaccacaatttcaccggaggacgcttcgcaccgtatctccccgggatcacaaagcctggctagcgagttttatcctctctcgagcacatctactttgaccaacgagttacgcgctcttctctctgatgcgcctgctcccaaagtcccggccattccccaggaatacacaagccataaaagaggaaagtcgtcactctcttctctcaggcgcctccttccaaaatcattcccattgtcgcttccattatcagcggatcctcaaatccaggccctggcagaccccaacaccgcatcagatgtcgaaaagcaagtcgtgacaccaaacactatgcccaagggtatccctcaatccaacacctaccaactcgtcccaaacggcaacaccccgaacgcttcttcagcatccctcccccaaagccctgccaacacccaacccaaccccaacccagtacagcaagaaggccacacccgaacaatgacaatgaactccgccgatgccccagaggtagtcccatcaaccccatccccaccaccaaaagtgcgccgctcgcaaacagccaactccatgcccgcagcccgctcaatccaccacccacaccacccaaacttcatcccacgtccccctccccaaccccaagcacgagtatattcccagtccgggcgacacgcccaagacccaaaaatgcatccagattcaatccgaaacgcaatgcaacctcaacaacccatcatccacaaccccgtccgcagctcctcctaccacttcgacccaaaccacgtcccccggcactcgcagagccagtacagcccccacccaaacaccaacggcagcagccgatatggacactactcatcccgccgggcaaaacagcgccgctacggctcagtccgatccatgccagcgccgatccctcctcgacacgacgtcgaggtaatctaccccagcacgcgtcgtccgcgcagtagtacccctgccggcgcgaatggcccgctaagctgtatcttggagatgacggacccacgtgcggtggatgatccgaggcctgtatctgtcgcttactcggagttgccgtcgaattctattgatgaaacgaaatatcgtggggcgaatcgtacgagtttgagcttttattgagatggtgtttgaatggatggaagtttggaaggagtattaatagatgtttgtctgctggtcggacgttcttttggttcaacttggtttatttcttcattttacatgatttgtattattggatagtgtgcccagtatgccagggtgatttggttactcttagtgttgttgcagttagcttttgataccaaatttaattcgttcaatgcgaagacaacattgaagtaggtagacaatacataattaaacattgaagagagaaggttgaaaggtcagtacaaagttcatttcgtagcactcggaagcaacaagatgcaaatttcgtctcaagacgagaacacaacagaccgcgaagacatgcaatttcaagatcccaaattccattccaggaagtactccaggccgctaaaagacgaatcaaaggaaacacaatgcaatccgcaacccgatatggtacatcaaccccagagaaagacaagatcaaacaatccagcccattaagccctagcctccgtagtcttaggcttctgcttctgagcatacttgtagcgataagcctgcccacttttggcatccacatcacggtctcgatcacgacgacggttttccttgccatgactctcggtcaaagaccccgatccccgacccagctccttctcgccccagctcatcatcaaagccttcgccatgcggtcacgctccttaaggagcaggtcgatgcgccgctcccactcgcgctcacgcttgtccaccgacaaagcaatgcgctggtcgaccgcagcggcggtttcgtcctttgcggcgatgatgtcttccagacgtctgagttctgatttgaagctctttcgtaggtgggtttcggaggtggcggatgaagcacgaaggcttgcaagttccgagcgtagatcagcctcgcgttgctcggtggcagtgaggaggttgcggattttgcgcattgattcggcgtgtgaggcgcgcagcgttgagactgccgttgagtgtgcggtttgcaggctgcggagttggctttgatggtttgcctccagggctgctgtgtctggtcctcttggctctgggttgagagctccacgcgctgttgggggcgagggtggtgggcttggaggttcggcgatcttgtcttcttgcaagcgggcgacggtctccagggactcggcgttccgttcttgtgattggattagatcgtgctgacacttgtttaaggctgttgtgagctcgcccactcgggttgagagtcgcgagttctcggtttcaatggttttgattagggtctggacttcagttgcctgaccacgcaggcgtgctgcttcggtatctgcggctttgtgtgcggcggataactcctggatttcttgctgaaggccggcgatacttggcgtgtctggctgttgcggttgctgcacaccttggctttccacgaacttgtccttcgacggcgagttgagtggggatgcgggattccctgggcccagatctttaatcagatcgagaatctcgctgtaggtgctatggccgctgataggcagatcagctgctgcggctttgagggcactctcctgggcttccatatgggattgaacacgggtgaggtttgcttccagcgtagtgttcttctcctccagaggacggtttttaatttccaggtcgataaagcgttcctcgaggacctgataatcattgtgcgcacgctctaattccgactcaagcttctcattttccagaccgtaatcgtcaatctgtgattggagtcgatcgatctccgagtttttctcctgtatttgtgtatccctggcccgtgtgacttccttaagcttggtgaatgtctcatccagagtttcatcgcgctttcgcacctgctcttgggaaagattgagttgctggcgcaagtgagcaatcgtctccagccgctccttgcctaaagagtcctgtgtatctctgtcttggagctgctgttgcatctcacgaatctggttcaagagaggactgagatccgttgcattcatgctcaactgccgtaatagctgctcacgctcttcatttttcttttgaagcgactgaacttgctcgcgcagcattgcctcgtcgctacctttggcgttcacctcatccaagagagaatccttgcgctgcaattctgcctggagatgacggatctgttcaccagcggaaacagcttcaagcacacgattgtgattcttctgcaattggtcatcgcgttccttcaaggcttgctgcagttgtgcaatctgctggtgaagatcctcattctgcttctctggtacatggctggaggcgtccgacaattttcggacggaaggcgatgcgggatccggggcctcgtcatcgtcggggatttcttcgataccttccaggtgagtcgaatctttgggaagagcgccagtccggtgtaacaggtgtgaaggggtcgacatatccactggtggtccgaattcactgtattccccggaatcggcttcttcttcgatggccggttgctttgatttccggaaagatcgtcgtaccgatccgtagtctacttccgcttcatcctcgtcttcatggttcgctccattttccggatcccccatcaagtatctctccatattggcagtaaagtcttccggacccccaacatcggataacttatctacatcttggtggaagggaggcagagtttcgtcaggcccatccaaggcaaaatggccgcttgggaagttgctaaaatccaaggtataatcggcaagacgcgcatcgagatctgaacctgttgggcttctaggagagcggggtcgagatattggttggatttcattgtcagaatggtattcatcatccgcagcctcgttgcgaccttggttgctactttgcgctgcgacgcgctcggttgcaggagtctgggcagttgcaggggtttgtgcggttgccggagagcccaatgggctagaaggatgctgaggaggagaggatggcatgaaaagaggcgtcaccaacgttgactgcccgatggtgtcatgtgaggtgtgaaacggcgaggtatagcctgtgttggccatggttgcgcacgcgtgcggatgcggatgcgcaaagatgagggcaacacgataaggctaaacagccaaagcagagttcaagtgcaattcttaaggttgcactggagagctaccaaatgaaaaatattaaccgagtaaatagagaaataacaataaccaaattgcgggggagaagagaaagattgaagaatctcgcgacgggttgtatttggccgcctgaggcggaaatgtttatccactgcctttttaggtctagcgggcatgtgtgtctactatgcttcttacttcttacttcttgacttctgattccgctcttgtttcacattaattatttgccatttgcatgaaattgatccttaaatcaagccattgtcttccattcttcgaatccaggtggaaccacagagggctcatgcgaccggccacgccgttcggcttctaactcggtttccccgtttcctggtgcttttctccgacctgcagcacgaccgcctttcgaagcgatagcatgctatttacgtttatacatttaactgcaggtcctttttactgtatgttggggcattctcacctgtttctctggatccatattatggaatccgcccacgccggtagcttttccacccttctttccacccttgtggcctatttctgaaagctgttcgcgtggacgattcgcaaaattcccagggttgggatgatgtgggtgttcaggcggtggtactgtggcgacactacaccgatgccacaatccgacgttcactgactgtccggatggaagcagtctggaaagtggacgtgacatgaaccgagtactaatcaaagccatcatgctgtcgaatgtgcaagttgatgttagaagtatacgctgctgcgcaagaagatgttgcttcgccacaaggctgctttgatggacatggcccgcaacttatgtagtcttcagaaacagctattttgcctccatcatctcatcggaggcgatggtggcttgtctctatgacattgcctttacgaaacccgctagtcggctagctacataccattcttgtatgactggaagaagtccacattgagatacactgtgttcctggttgttcgtttcaatttgctggagcacgaatccggtattcaagtttgatgtcatccccaggtcttcctaaacgagcccaagtccaacaccatgggtatagggactgtttcccatggttctagtattgaagctatgagcccgacatggggatgaaaagaagatgccctactagcaagttaatatcgaatttaaaccacgaaggtaggtatatggccctacttgatcccagcaacaatcatagtttcttgtagatagctggtagccttgcccaaaaaatggatcgaccattcggcttagtcaggatttgtgtttatcgtgtgcaggtgttcaatccgatctactactctgtgttgcagtaatattctctggctatttccatttttggtctggaaatttgtcattggataacaccgggggttttatttactactctgtgctcattcccttcaagcgctaggagctcgaagaatttcgaacccccacatctgccaatcgccaaagcttgagcgagtcatccagctctcacaaagcgaagctcgtgggataaacttgctataatctacgtttatctgggcattcaagtcatccccctttttgaaatgccccctatccgaggtggactcggcgagcgcccgcgggtgatcctgtaccaccaaacgctcatcccaggtgggggccagtatgtctccatgctcccgctcctggaaaacaacaccgggataacacatcttattctcgcggcttttcacctaaacggtgcaccaggagatatcactctcaacgatgacccgccagacagcgccaagttcgaccccctatgggccgaagtacccgtcatgcagcagcaaggcgtgaaagtgatgggcatgctaggcggggcggccccgggctcattcacgcgccttgacggcagccgggcggaattcgaacaattttattaccctttcctgaccatgatccgccgccatggccttgatggaatcgatctcgatgtagaagaggccatgtccttgcaaggcatcattcgactcatcgaccgactcaaggctgacatgggcgacgcatttatcatcaccttggctcctgtggcagctgcactacttggtattgggaacctatccggctttgactaccgtgagctcgagcaggctcgggcttctaagattgactggtacaatgcccagttctacaatggctggggtcttgctgaggatccacggatgtatgctgctatggtttctcaggggtggtctccgcgacggattgtgtatggcctgttgacaaacccgggtaatggatcacagggttatgtgtcccaggaaaaaattggacctgtcctggccatgttggttgagcagtttcccaacttcggtggcgttatgggttgggagtatttcaatgctctacctggaggcacggcgaaaccgtggcagtgggctgctgcgatgtcattgagtatgggcataagagatgttgtcgcggtagctcgtcagttaatgtcggcagggccgatggcgagcaccctcaataatttgtttcaagatatgctgaatcagggacatcaatgaaacacaatggatatgtatcattccagacaaactatggctaatataactacttgcacttcaaacccaacatgaagttactaggccagctgtagtgcctgggctgtacctaggtaggtactgccattgtggtttaagtgtataaatccaacttatagttaaatagtagacgccagttgtataatttacacgatttatgcaattttcaataaccaatacgatcaaatacgatcaatcttgaaacattgaaacattggagcctcttgtgttgtcgatctttcccctaaatgtgatacgtcatcatatcacgaatcaacaggaaactccatcttccactcttcaccatctccatttcttctatttagcatgcggtgatttccacattttgaaattggccatattgcttcgcataatggcctccctacggcgaattgctgtagccacgagctcggcgatcatccgcttgacgagcttcgtgtttctgcgatgggtataagaccctcccataaacagttaatatcgcgcttcagaagactcacataattatagatccctggccatcactttgtgcctctcgtgattacctctctattggtgtacctgtcatcaatattttccttgctcaaggacacccagcctcaccaaagccaaacaactacagtcagaggctcgaacagtcaggctgccctttcaaataattgcaatatgagattctaactacgtaatttacaggacataagtcaggatctagccgtgccaaaaccggcgattctggtcttaacactctgttggcagggcttccctcggcaaggtggcccctgtggaccagaatcacgatattaatcaatgtcgtcctggcagtgctaacacttgatttcctgacccgtggtgttctactttatccaaccaccgatgttgcgttctcgcgcgttggatatgtctccccgactactgccaacttggtctttcgcgagcctgacacggctcgcctaccagtgacggtcatgttccaggaggtctctgaaatgagcccggactggcacgaagaaggcatcgtttacaaactggataagaccacagactttactacgactgtgactctaaccgacctgaagccggcgacacactatcgctattcactgtctaacaacaagtctggcacgtttaccacggcgccatcgcccgaaacccgtgaatcaaagcgactatcttttgtaacgtcaagttgcctaaagccaaacttcccttacaacattctatcgcatccactacgggtcccaggcctcgagcaaatgaccgacgccctcgccaaactgcccaagctacttcgcccagcatttatgctcttcctaggcgacttcatctacatagacgtcccctggcgcttcggctcatcaatggaacactaccgcagcgagtatagacgcatctactcctccccctcctggaaccacgggccagaagaaatccgcgccattgacctcccctggctgcacactctggacgaccacgagatccaaaatgactggtcgcagggcaacaaaaccgctccatatcccgcagcagcagaccccttcatccactaccacgtgcgggcaaacccacccatcccgcaagcgcctttcgcccatccagacaacgtaacctacttcgccttcacccaaggcccagcctcattcttcatgctagacacacgcacctaccgcaccgagcctgcacaccagaactcaaccatcctcggccacccccagctccaatccctcctaacgtacatctcaaccccagagccagcaggtgtacactggaaaatcatctcctccagcgtgcccttcactaagaactggcacgtcggcaccacagatacctggggcgggttcctcgacgagcgccgcaccgtcttcgaagcaatgtggcgcgcagagcgcgagttaggtatccgcatcgtcatgcttagcggtgacagacacgaattcggtgccactaggttcccggacccggaacttaacctcggtcccgatcaacttttgcctaatacggctgggttgggattgcacgagttcagtgttgggccgttgagcatgttctacctccccgtccgtacgtaccaccagacagactctgaggatgttatggtgaagtatgcgccgaatgggaatagtaagttcgggcttattgatattgcggatgaggttgaagatgttggttcgactgctgctgcgcctgttcgggctcgtagctccgttcttacttactcgttatatgtggatggggaggttgtttggaagtatcgtctcagtgtgccattggaccgcgatatgagtgtgcatggcccgtctctgccgccgggccgtgtggttcaggatgagattccagatcttagttggagtgtggtgcttgggacggttgtgggacggttgccggagttgacaaagcggtctgttgagacagttaatgatctcttctttcaactcgcagatcgactgtggaggatcgagagactcgattaactggttttgtcgcttctccagggatcacatcgtttgctcattttgaatctgttcaaggcaggttgccttaccatattgatagatgtttccaaacaggtggcctctcaggtgcgataaattagataacacagtatttagatagcgcaacttgaatcgaattacaattcagtttctataattaatcatcaaatgaattaaatgcctagcaagccggagcgagatcgggctgtggtttttatctcgttacatagctatatggtggggaagggaagattttatacacggtttgcgctgcactgctaaaccaaaaacatgacgccgatcgactttccccgggatccattcactggggtataagatgtagacaggtggaagatggaggagagtggagaccgagtatcaatgacgcacgcgacgggagaaatgcttccgatgttgccaatatggaagattcagatgtccaactgtctcgaccactaatgaggagggatggagtaagaaacgaaagaacatcgcagagacttgattaaggaatgtctcttcgcgaatgattaagtgaatcagttgagtggcgatttggcggattccaagatgaagacaaagatgaagacgaaggcctcatagcttgacggcatcccttagaagcgtccaccgctggaacggccatggccacctcttgttgtcacctcgtcttcgctgccaccagcgactccgcccaacaagctggctccccagatgccggcgataccccacatgccaatacgccagccgcggtacaggccctgaataccctggccttgctgtcgcttctgctgtgaggtacgctggccgaggagttgtttagcacgttccgtgtcggacggtttcgagctgacaccctcctcgtaaacaacgtgccacatggtgccaatgataccgcggtatgtacgcggggtagggacgatggtttccacatcggaagcatcaatagatgtggcactgatgctaccgcccgatgacttctggcgcaggctcaaggacgtgtatgtggcgatctgggcgcggcggagcacggtctcaagcgggaatcgcacggcgagctcaagaccggagccgaggaacgcacagaggttccatgcgtttgggtttaggagggggtcaatggacagatatgatttgaggaagagtggcgtcgaggtcataatgagattcgggagacttgagtggagcacagtgattgggacgagatgcgaggggatcgtgcagttgggtgtggggagctggcggatagctcggacgagggaccccggcccatgggttgctggtgtgagcatcaggaatgtacgagcggtgtcgataggagctaggatcagggcggatagcgaggatgaaatgaatgacaagaccagcgttgccagaggggaggatgccgtcagaatgtccgccgtcatcgacattgaaatatcttcttctggcaagccgacaattgccgtcagcagactgcggatgaaagtgttcaaagtcggcaggagaagtgagtaaatgaatgtggtgttagaggacttccagagggaggttgggccactggaggaccagagctgggatagaacttcggtcagggagttcgagttcttgatagtcagagcatgcttgggctgtgcggcagactctggtcgaatatagccactgcggtcggtgatatggtggcgtggcttgcgagatctaggtgtactcggcgtgggcgttggaggggcggttgaggtgaagtaactagtttcatcatcggatgattctgagtcctatacgcaaatccgtcagtcatttgtcgtggagttcaacacagctgtatatcagctatagagaacagccttcttaccgaatcataagagcttccttcagcacccggtgtcgagttccgatcccgctgctcctctgtggcgtctggtacgacatacacctgcaagatggttttggcgacgtcgaacggctgtgcggtaagaaccttggtgtagcgcacaagagcccggttcaatgtatcccgaacccagtcagtcacagagggcgaggcttccagataatcagcatagtccaagtccggcatgagatcgcgagctgtgctgccaaacacctgggccgatgacgacgatgccacctcggcgggcgcatttgaagcgggcgataagccagacggagggatatagtaaggccgcaagggattgatcccttcacgagtcgccataatgtgatgttggtcggagttagagagtcggggaacgaagaacgggaggagtggaatggccgaacgcccaagctttgtcagtcatttttttcctccgcggccattggacgatcattgctcactcttcccatcttcccccggatcctctttttctctctttttgacttccgaattccccttttaatttattattccccttttctgcaacatgactttctggcgagaagtcggtcggcaactgcgccgtgtacctaagaccggggatatctgtttgactcaatcgcggagatgcctaagttattcaaggtcatggaccaacaccggaatcaagacacatcctcggtcggatatcaatgcacggagaagccttcaatcaccttggcaaggatataataaagcccggcgtgctttctcggtgactgcacaagctgcgcatggtcatatcacgccgccaaagcccggagaagagtaagccagatttgcactcatgctgcgctcttgtgctgtctgcgctgcatgctgacagattctttaggatcaacgtgactttcattgacaaggatggcaccaaggtagacctccaggttgctgagggtgataacctactcgacatcgcacaggcaaatgaccttgaaatggaaggtgagttgagccgatatgatgcatctttaagcacaagtatctaacatcacgccgggaataggtgcgtgcggaggatcctgcgcctgctcaacgtgccatgtgattgtggaggacccggatacctttgataaaatggaagagccatcggacgacgagaatgacatgttggatctggctttcgggcttaccgagacctctcggttgggctgccaggtgatcatgaccaaggatctcgacggactggtcgtgcgattgccgtccatgacacggaatctccaagcaagcgactttgagtcgaaataaagaccccaacagaaaccccaggagggactgtttggatcttacataccctcacatcttatctggaccgagacagctggtcacagagggggtttacggtcctatttggacaccaaatatagggctttgtactgtaatattcatctgatgcgtctagtagacttgcacggtatcacaaaatggaaatctcctgtactattttgatcgaacatgattttccacataagcacttttattacaatgtagaaaagaatatataacaaaaaaaaaagactctcccaacgccagaaacatgccatgggtaatcgtagatccagctcacgcctcttcgatgttcaaaggctttcccttctttccattgatcaattcaaggaatccttgcttgctgacctcattggcagccttctcccgctctcccataccaattgtgcccttcttgcgctcatccttggccgcctcctctcctcggacttgggccgcgcgcacagcattgaacagcttcacgacaccacgctgcgccatcttgcgcacccgcttctcctcctcggcgacggcaccagcaattcctcgctggatacccatcacatcacgaatacggccacgatccaattcctctttcttctcggcgcgcaacttggcccgcgcggcattgtcgagcttctcatccgcagcgtcgttgaccagcttggcagcatatgagcttcgcgagagaacgggatcagcccgtgcagaggtaggaagttttgtagacagaattttggaaatagaggttgagaatgcggtagggtcgttgcgcttggggacggctcggccgcgattggcgcctgtagatttgccggctggggacgagtcggaaaggtcatcttcgtcggatccaaaggcatcgctttcatcgtcatcgttctcgagatcttcatcgtccagctcgatctcctcgccgacattggagtctgcgtcgctatcgtctgaatttttcggttccggtgcaggtgcttctttttgtgtctttgccctcttcatgcgtagatcgagtgctgagggcttggtcactgtgactcctccttcttcggcgtccgagtcttcaagactgacaggattgaaattcccatcttcttcttcgtcctccgagctgctgtgatagaagcgctgcttgacgaacttcttcttgcggccagtctcgccctttaagccatcgagaaccttgcgctttttggaaaaagtaggaggcattgtcacagaaaaataatgtaataaatacaagacaagaagaaagtcaagacgctgatccaactttgccgtatcacaacttttttttggggcggtgagaaagcgtgggctctccgattggcccctccacattgcctctctggtctctcgacgggcttcatcctcacccctcctccatcgcgaaatcatagacaactacggtcttagtctcgttttctctttttaattgtttacatctacacacatactcaccatggttcttcaagaccttgggcggcgaatcaactccgccgtcaatgacctgacgaggtccaataacctcgacgagaaggtatgctatgtgttgtccagtgcggcccacaagccagcccgctaatacaataacaggcattcgatgacatgctcaaggaaatttgcgccgctcttctctccgccgatgtcaacgtccgtctagtagggactctacgcaaatcgatcaaggccagcgtgaacttcgcctccctcccagcagcagtgaacaagaagcgactgatccagaagaccgtcttcgacgagctcgtaaaattggtggacccccatgcagactcattccggccgaagaagggtcgctccaacgtgatcatgttcgtcggtctgcagggtgcgggtaagacaacaacgtgtacgaagctggctcggcactaccagacgcgaggattcaagacagcgctggtctgcgcggataccttccgtgctggtgcttttgatcagctgaagcagaatgccaccaaggctaagatcccatactatggtagtctgacgcagacggatcctgctgtcgtggccgcagagggtgtggccaagtttaagaaggagcgtttcgatatcatcatcgtcgataccagtggtcgccaccggcaagaggaggagctctttacggaaatgacacaaattcagactgccgtgacgccagaccagaccattctcgtgctcgacagcacaattggtcaagcagccgaggctcagtccgcagcgttcaaggcaaccgcagactttggagctattatcattaccaagaccgacggccatgccgccggtggtggtgccatttctgctgtcgccgccacgcacactcccattatcttcctcggtactggtgagcacatgatggatctggaacgattcgagccccgcgcgttcgttcagaagctactgggcatgggtgatgtcgccgggctggtcgagcacgtccaggccatgacgaaggattccgccggtgccaaggagacatacaagcacattgcggaaggtatctacactctgcgcgacttccgcgagaacatcacatccatcatgaagatgggcccgctgtccaagttatccggcatgatccccggtctgtctaacatgacccaaggcttggatgacgaggacggttcactgaagctacgccgcatggtttacatcttcgatagtatgactgtagccgagctggacggcgacggcaagaacttcgtcgagcagcctagccgcatggttcgtatcgcgcacggcagtggaaccaccgtccgtgaggtcgaggatttgctctcccagcaccgcatgatggccggcatggccaagcgtgttggtggccagaagaagcaaatgcagcaagctcagaacatgatgaagggtgggaacaaaaatcagcagatggctgccatgcagaagcggatggcttctatgggtggtgctggcggcggtggcatgcccggtatgcctgacatggccaagatgatgcagatgatgggaggtggtggtggtggcatgccggatatgcagagcctaatgagtcaaatgggtgggttgatgggtggaatgggaggcggtggtggtggacgtggaagaggacgttaagctcagtctttgatgatcttgccgcgtcccttcgtttcctttccctctcttttccatatcaaaccgctggctcatcaacttagcatctgggctggtgtttggcgttttcttgcttcttcacattatgtgcaacccttgtatacgagaacaatttcacatataccatcctgatagaggaatcatattccctccttgttctacatctcgaattacgattttgaaaagaaagacaagttgcagtgcggtactatcgtctcattcataataaaaccacgttgtacacataatcattaaaagagaaacgccgctaaattccatccgtctaatgaaatgagagaattcagatcgaaagcaaaggaaccaccagatcaaccactgaccatgttcatagcaaccaggagactctacaccaggcgagcccagtgagatcgaatgagaaccaatatgtcatgctttttgggtagacagagaatagatcgggccatatagatgtacacggaaccagatcgattcccatgcaaggcagggggaaaaagacaggaaggatataagacaagtccgtatgatggtacattgagcgcccgggtgaggaggggggtatgggtatcaaaaagtgtccttatggtggaggaccgaaaaaaacgcaggtaacccggacgcatgagatccacaatgaggattgtttatttttcagcgaagcgacggtcgaagtatcgcagcacacccatgacgcttgcagcctcgacttccatggcaccgcggctgtctggtggagcgatctcgcgggggtcggggagggtgtggagcttcggcaaccaggttgagatctcgtcagtggcacgagagaagttcgggtgacgagacagggtggtgaaggtatcggcacagctgagcgttaactctgagggcggagcgggcttgggtgcgggaggttgcgaaggcatggcggcgtttttacgcgagttgggcgcgctggagggggcatttcttgacatgcagcatccgccgtcctttcctccgcctccgcagcagcctcctcccgatggagttccgctcgctgaccgggaggctgccaacgtcttgcaaaaaagagtgcttcgggggtcggcttgacactgggcgcaggtgcctggcccgttggcacagggattggtcgcttggctaatgggtgggagagtcacttctgagcggacgtctccctcggatgggggtggggtaaattgggagatggattggattggcgcgagacggttggtctcgaatgtgttgatgttgcgtacacgctgctgctcctgtgcggccatctcggcgcagatacagggagtaccgtcctggcagaacccgcagggatcaacggggggcgaggagacgtcgttgtcctgagactgagtcggaacactagagaactgagcggtgaagtcgatttccatctcttccggatcgggcttgatgtggggatccctatggtcgcgttccgggctgcccacgccatgaggctcgtgtctcgaacgagatgactcgtgggtgtccattggcatgccgaacgcatcttcgatacactggcagtgggcgttggaacagttgttgcaccccagaggtacattcacctgtccatcttccttgttgcgttcagtactggtaggctgcacgtcctccattcgggagcttctggtcttgcgaggtggcaagggcacagagtctggaataggcgcgggcttgctggcgctagggccggtaagagatgacctgaattccttgacaagggcctcctttgcgctgcgctcgatcgatacttccttctccaaggcgtggcatcggtcgcgccaccagcccatctcctcgcggcactgatcaacctcaccggagaggtttccaatttgctgttggagcgaggcaacttggacatcgtggttatcttccatttccttcatttgctcttccagttcactaacacgagccgcccgacgctcacggaaggcccgttgagctgctcggttctgcgctttgcgtttggttggcggtgtgtctgtagctggcttgcgacctggcttggggcgtggtgggatgacccattctttcgaggtgatggagccgggtgtacccggtcctggcgaaggggctacggagggcctggcggccagtgtgggcgccggtgcgagggccagtgcaggaactccagctggagcaggtgccatagacacaccactggccattttgacaccaaattgatgttcaaatactatgtttgaggtcagttggaaacatggtaatcgggcgtggtcgggggcagacgcacgagccgtttctcggtcggaagagcggaagtgcgctcataagagccgataagcgagaaataccagtagagaaaagaaccagttcgctttcaagctcgtggaaaataaccaataaccagacggagaggacagaaagggtataggaaggtataggtataggaaggttaaaagcaagagaagagatgtgaagggagggggaagaaaaagtggccgatgatcagattagattatgtgctcacatgatgccggtttcggaagagctttctgtattttggagttttggtggtttttttgcttccaaggtgggatgtgggatcttctttttcttttttatactaatttaccattggtccatttgctatttcgctaaacccaatgccgcgatttccttcgaaatttttatctgatccgaatctgagtggagatggttccgagagagcgtcggtgggctgacgcaacactctttattgtacggagtacaatatacgaagtaatatattctcatatttcttcgctaactgcgtgtattgtttcttgtagatacacctcgagcatcaattgcctgaacaaagaacattgcaataccaaataatcgtgttccaattcccaattgcatactccgtaacatggctataactccctacatacacagtacaccgttcacccgatcgtcgatgactcaacgacaggcgacacggatcagaaaccctccagatggaaaaatttgctcgggtggggcgtctcgtcaatccattgaccatggatgggcaaaaccccccctacgtcccggtctcccagccctgtagccattacctagcagaaacggcgataagccaattagaacatgccagtgcgcaaaagaactttcccagaagtcatccaccagcggtgagggtatggatcgacatgggaattggatcccgtgccgttctcggtctctctgatcttatctgattgcactaatgccggttgctaggaccgcaatccaagggctaaactgataatcggcagaacctgtctttcttttattgccgtattttccctttcttggtgattgggtgaaagccttggaaatggttggtcttggccttggaagtgaccccccacagcagaatcttatcaatcagtacggagtaaatgatgccaacctcattgtgaaggccgaacagcggaactttcgtgtacatggcccgatctggagaatatcgcggctacttagtcacaaccagagatggctgtgacatggatatgcagagtttgacggaaaatatggaattcctcgaaacaattcgccgccattggacacaccatagcgttcaaaggccactattctcggcgatccgaaaagctgatccactgttctcagttatatcctttcagtgcgattatcatgaaacctgttgtctaaacttgacgacgggttgtcctcgtgagatcatcgcaaatataatagaacaatacaacatatgaaggaaccccaatttgcacttgatcttctgggatgaattactatagaacataatctatgagcggattagattccagctacagccgatcattgccgggattcggcgtttgcctccagagctctcaatttgcaagagacatagacgctacgctggtacctagaatatctccaattctcgggtaattgatttacgaaaaactaatacttcaaatgtttccagctccattgggactcaatgaagtgttcgggtcaagaatatgcatttccttccattgacgacatcagcatggccccttcccttgggaatgaatgttttcaagaggcgggtctaatgataacgtccgaagtgttattagtacaggactgatggcaaattgggagtcattctgttcaagacatccataacatcaacgtaacaaaacattcacaactccgttaattgaggagttccgtctgttgggggagcagagtgcttggtctgtacgaagaccttctgcatgcccatctctcgcttgttgaaaattgcatacaatttctccatgtcttccaaacggacccggtgggttaccatatccagtggattgatatcgttcgcttgaatgagatgcatgaggtgtttccaatacttctgcacaggagcctgtccattacccataaggtgtacgcctgtctgcatcagagccccaatgttaaagtgattggtctgagaatgacggttagatacttcactcttccgaaaaccggtgaactcacaaatccggcatagacacccgtcaccccaacgtggccaaacgggcgaacggcagtaatcatctcattcaacaactccgaggtatctgtctccatcccaagcatctgttcaaagtaatgcgcccatcctttagcgtattcgcccgctgcacattccaaagcaacatctggtccgccatcaaccattttttgcagctgtgatgtcaccgactcgcctttgggtagatcggcgaagttgattgtctcaacctttggcgctttagtcttcacaaagtccaatcgccatgcaccatcacctccgtcgataaggataactcgactagcgccatggaagaagctgaactgtgcacacatctgcccgatcggtccagctccccagatcgcaacaacatctcctttcttaacaccggtgtcgaccacgcagtgccatgatgttgccacaacatccgagacataaagtgccttctcatctggcacatcggttggaatggaaagtaggttgacgtcgccgtatggaactcgaatgtactcggcctggccacctgcaaacccacctgtaaaatgggaatatccaaatatgcctgttatccatttagtatgaaccttaggacactcaggttcaggcgaagtgcatataacttacctgcagttcgcttcccatacaaggcattggtcaaagtgttctcctgggtcctgtcacattgagaatagtactctctccgacaattcttgcaatcgccacaagcaattggaaaagaaacaacgactcgttctccaactttgatattctttgcctcgggccctacactgtccacaaccccgcagcattcatggccgagcacgtcgcccttctccaactgaggaatgacccctttgcccagcacagttgtgtcagttttcagcttgctcgcattcgcggaattatcttcataccatgatacaggtgcaggtcgctaccgcaaatagtgcttcctgtcaccttgacaatcacgtctccagggtcgatcacccgtggcttcggcatttccactgatcgcagtggtcagcaatgcatgggatcaaattgtcgcttccaaggttgcttctctcgcttaccaactttgacttgattcttcccttgccaggtagtagcctggatcatctctccggtctccaccccatattcattgtcgtagctggacacatcagtggtgattgttgcattatcaccatggccgagagccttctctaccaggtttgctgcctgggtcatcgccattttcaatctgtttcagtgaattggtatgtacgattgggatacagtggatttactcgttcactgtgtccatcggggataataaaaatctcaggatgattttgtactcattgagcagatccacattcgatcttcatttgtgatgctttctttgtaatatatctggggttggggggaatttttgtctgacatcaccatgatgccgggcgtacgtcaagcagagctatccccagtttccaggacgagaagaatagtctactctactatatatagatcctgctatatactgatcagtattatctctggcattcgtggaacaaattgagcccgtctttgcaccttgctccgggccccacgacgtcattgacttcccatagaggtcgcttggatttgtgtggccgcagtaaaaacacgaattacatcaccatgatgccgggcgtacgtcaagcagagctatccccagtttccaggacgagaagaatagtctactctactatatatagatcctgctatatactgatcagtattatctctggcattcgtggaacaaattgagcccgtctttgcaccttgctccgggccccacgacgtcattgacttcccatagaggtcgcttggatttgtgtggccgcagtaaaaacacgaattttcggactataatacttcaaagaggagtttggaggaggctaatagttgcagccaagcatacacgaaagcgttctagaccatgggagttggcgatgcgcaatagtttttcagatatatatccggatatacttgcagagtaatagtatattctatcagcgtttcaaaattacccgactgttacatcacttaagtagtgatttgcaatggaatatgaatattctcatactcgaatattatcttcgtggcagatttgctagatactagaaccgatctggtaggatcttgtagcaaatggcgtcatagggcttagtttcgatgtatgcgagcgactcataggtctaaattaaacatctaccaagcgagctaggttgttgatacttgggctagtagaatatgcctacatgtcaatatgtatcatctaacctataataaatgaatacgtcgttgtcacgcgccaatacctctggacagctgaatccgttatcacttatcaccggactcagcgataaacaagggatgggtcaggtaccagccccgtcggaactccgccttttcccctcagttctctccaactctcttccctacactcatactagcacatttacaatatgaccagaaaatacaactcggcccaaggcctcgaaacgccatggacttcgcaaatatccgcccagctgcccagttcattcatgcctgtacctgcagcacagccagtccgagctcaggcaccgatcgccgatgaacccgtccgaccagaggattactccaagccatactgcgagttcatgacatccaatcccacaattttccacgccgtcaaatccttctccaagcagctcgaagagcacggctacaagcctctctccgagagagcggtgtggacatcggagctgaaacgaggcggcaagttctacacgacccgcaacggcagctctttgatcgctttcaacattggctccaaatacgagagcggcaacggcgtggctatcgttgctggccacgtcgacgccttgactgccaagctgaagcccgtgtccaagctgccgaacaaagcaggcttccagcagctcggcgttgccccgtacgccggtggtctcggcaacacttggtgggatcgcgatcttggtatcggtggtcgagtgcttgttcgcgacccggaaaccggcaaggtggagactaagctggtcaaacttgactggcctattgctcgtgtgcctaccctcgccccccatttcggttctcctgcgaatggtccattcaaccaggaaacccaaatggtgcctgtcatcggaatagataattccgatttgtttgaaaactccaaggttgagtctagcaacacaaagtttggcacatttacctcgacccagcctgagaagcttgtgaagatcatctccaaggagcttggcatcacagattatagcactattgtcaactgggaattggaactctttgacacccagcctgctcaattaggcggtctggagaaggacatgatctttgccggccgcattgacgacaagctctgttgctatgcggcacaggaagcgctcattgcttcttcggacagcacatcgaccggaaccgtgaagatggttggtatgttcgatgatgaagagattggcagtttgctccgacagggtgctcggtcgaactttatgagcagcgtcattgagcggattaccgaggccttcgcgaaggacaactacggccccaacctcctttcccagacagtggcgaacagcttcttggtatcatcagacgtcatccacgcagtgaacccgaacttccttaatgtctacctggagaaccacgcgccacgccttaacgttggcgtggcagtgtctgccgactcaaacggacacatgactaccgacagcgtcagcgagggtgtcatgaggcgaattgcagagcgctgtgggtcaaccctgcaggtcttccagattcgcaatgactctcgcagcggtggcactattgggcccatgaccagtgcccagatcggcatgagggccattgactgcggtatcccccagctgagcatgcatagtatccgggcgactactggcagcttggaccccggtctgggtgtcaagttgttcaagggattcttcgaccactacgaagaagttgataaggagttcaccgacttttagatcgataattccacactttgctttagacagtatagagcccgttctcatttgtgcatgcttgctataggcgtgttgcctcgctattcattctcttggggcgtgtattggattacgaccaagtggcttcattctgtgactgttgctcttccatctctcggtattaagttattcgtttgattcgattgctgtacttcgactatctatatatccaagaatttccaaacctagattccatattactatatctttaaaatgacataagaacaaaaatagcgagtgtccacagccctagaggtataccgcacgggggtaattatgacccagcaaccgcaggcccaaagagcgtggtgaaaccctgacgagaaacgaaaaaggaaaaatccgacgggtatatgacgttatactccaaggcaccaagctgactgcaagagccatccaaaaaccaaatgcgtgtctatacatcaacagaccttcaaaacggcaccgctgaacccgcaggtaaaggacgaggatacgtcagattaggccgatcgcgaggctcaggaacaaacgcaatccgagctaatttcttctcttcctctctcgtccagcgcttaatactagacctgaatccagtaccaggaacaagagcgagaacccgctcggggtcaccggcaccatactcgtgttcttcaccgtgagcaccgagagttgatgcatcgccgttccagtcggagttgcgctgggttgtgtcgccgcgcgtgggacgactggcgttgaaggtcgataccattcctgggaagatgcgggcgacgaggggtttgagggttggtagacaggcgcagatgatgcctgtattgcattcgatggcggaccaggaggcagcgccgacattgtcgtctttgtgtggggttagctttgttttgggttgtgatagagctaggcgaaacgatacgtacaggtgggatcggacgattcggcgatctttttcagactgactagacggatgacactggtgacgcagacactttgtgctatgttagttctggacggttcaatctgatatctggaatttgataacttacaagccacccatagcgaacatgatcattaaagcgatcttctgttttcggggcaggtcgactgccattaaagccgggatgggaatgacgaggatggcaatatcggtcgcgatgtgcatactagcattggagaaccatagctttgttttgttcaaacagtaaccctgaattgaatcgtcccagaatttggcgacgggaatgcagtttaggaatgcactgatgaccgcccaggtgccatagatggcgaggacagtaatcatgacccagcagacgactcgcatgcggtgcgttgggaagactcggaagtactgcatcagaattgaggctttggcgcagaggacggcggcgttgtagaaaggaatggtgagccagaaggcctgtccggatcggttgttagatgtagttgatagctgaggacacggcttagggcaagctcaccttcatctgtctctcgagaatgtttggtgggatatctttcaaatgcattcccatgccactgacggcttcgataatgtcgagggccatgaagacatatgaattgacctatacatctgcattagtatctggtatttcttcgatatcgatcacccaacttaccagtgcaataatgaccatccagtcatttgcttccacccgattcataagtttcatacgagtatacatcctcatcgcaacgaaacaggttgccaaggctgtgaacacaacgcttatgatcaagccctcctggcctccggaggacaacaatatgccgtcattatctcgcctgaagatcgcatctcgaatgtacaacaaattcattgtcaatcgatcttgcggctttaaacaaaagaagggatggctactcctcaaagagaagattgcctggggataatccaatgatcagatcagtataggatgttgatctgattcacgattgagatagggcaccaaaggagtgataagagaacaacctctccagtaagcgaaaattacgagaggatatcgcagtattataatcgcaagtgcataaaactgatgcgcagcgtcgccatcaacaatgcagccccagaaaccaaacggcctaggaacgaatccactatccctttttcagagagagacagtaccaattccctaaaaggacagtcatttcctctcccctcactcctcggatgagcgggcgagtgcttctgacgcgagacaggatccccgtctgggaagcgtgtttgcagcagcgtgcagcgcaaggggccccatacaacgaatcgggtccagagttggccccgatggactcgatatgtacatatgtgctccgtactaacaattctacgatgtttctttgttgttttttttgcttttgccctcatttttaaaaaggttttctctttgaacctggttgtggctgcaatttacaggacaaattatagtttgcagggtccttggtatatcaatttccaccttatttcgagaccccagaaacatttaccccttcgtcccactggtcttgatcaataatttgaatctattcatgtcgatcgcctgtggacgatctgctcgattaccgatcagatcgggtctccactgggttattctctcgattgacgcacggtaaactatacttccacggattatcattcgatttcaatattttatgatgctatactccatatacatgcaatacaacttagttgaagtgattccaaattactttgaatatgccatgacgcaagtcttgcatacagtttgtacctgcagacagctcggaggtcatcttattcgctatccgatcatctccgacggtgacactgaacaacaaaatttatagaaattgatgatgacgcgtgtggcctgatactatactgacttggagttagccaaccatatgtatcaatctgctcatggaatctctcactgcagttggtctatatgtggaaagatgctcagccatagggatcaattccggcttaaatgtgtcggccttattaattacagggcttttatgatggtggtcatgcgactcagcttagttagaagtcaacctctcataccctattctatacggattagtccaggtgcggtaaagactgccaggcaataaaggcgcagtgcaaacagtaatgacgggggcggaggggagtggttggtaaaagcctggagccgcaatatcgagacagccttggttgatcaggacacgacccttggctgaatacactaccctatacatgagttgatcgactttccttcgacttacggctctcccctcattttgttaccttggagatttgaggaatggttattacaagattgcgtctgtcttaaacagtcttaaacagttgactgagagacgaacaatttcctgtagacattgtctcattttgcatgttagggctctattaagctcatctgccgcatctgatgtgtaaggggttctctacttattgccactgaactactttctatgcaacatatatacccacatctaaaataacacagtgtccaattgaacatcaaaggaaaatatgggagagagactaaatctcctatttgttggaacacccagccacttccctcgataatgttagaggcctcgtcagggataaccattttgtattgccccggatatccgttcccgaaaagcttcgtttgctttaatttgagaacttgtttaatctattaaacctgttgaacttttatgagtgtctctcatacaaagaacgtcagtctcagtatgacaaccttggaatgtggcctcgattagtcgcgtctcacaacatccaaagctgctaaccacgtaactcagctcgtggcaatgcgtcgaaatttttggaagagttcaagaaaaagcaattaaaacgttacgctatttgaactgttccttaatggagtgtggccgaaatggacccctgccaagtggcgttggctagttgacatatcacatacgatccttagggctattcgtctggacacaaacgtattgaaagttggtcctctatcgcaggatcaaagaaacatggctttgcgtttctaactaccacattttcaattctgtagtggaacactcatatatgcaatacatcttgtcaatatgcagggcgctaggtgctagactcgcgctgtatgcaggctgccttgcttaccgagttgtcatggcagcttgggacttcgaatcctgccttaacctagaatgtacggagtagaatctactccgtagtctctattaggatcagactactcctcaatgcttaggtgcttactccgtacatcaactacttttgattggagaccgaaaacttacactcgatgcttaaattgttagtgatcagccagggaggaactaatgggagttaaaaagacggttagttgcaattttgggcaattgataagccaagacggttctatacctactctagtcaacgatgccatgggtaggatgcatctccttaccatccctttatctccggtcacccaacttactgcagctagccggattcaaattgggatcgggacagcttgattggagtggattccacgtgtattgactactttctctctctttctatcgtggctttgagtctacaagtctcccatctgatactttttctcgcgaagctttttaggaatgtactagctccatgtttagacaacttcttacctactaggcgaaagatcctctgaaattactgggctgtgcaagctacttggaccaagatgcgaactccgtgttctaaatcaagctgctgctggttagaacgcgagaagtcatcatggttccttgcctaggtacagcctgcagcaagcaactctctttgccattgtcttttattttttattttttatttttttacacaaggaccttgaggattttggttgaggctgcaggttgaaacatgcaatgtccctatcctaggaagatcaattatccacagagagatacatatgacacgcgagatttgtggtactaatcttagaacttacattggttggaagctgcttgcgttgaacataggttctctactgagattatatcttctatcaaagtaatcgccgcaagagacgaacagatttgtttggccttcgaaagtatttgaagagactttttactcagcctggggaggcatcggtaacctattggcctggtttccaatatgagctggtctgaacatggcggtgactgggtgttatgtcctgcctgaaaaaaagaaggaatcttattctgctgaggcctagaaggatctgttactaactagagatttgcttccactatgggcataaaatccccattcaatcgaaattgtataggggcatttcagtgttgtggaaaatatcctgacaacaacggtgtcttggcctacattttgcccaaaagtgttgaatttaatatacagccctcaatgcgacaaatccaaatatcaaatgacaagaaaatagacgtacaaacaaagctttctgatgtccaactgcatgtacaaagacacaagtggtgtacctgggcagtagatttggataggcgataagatagaccgataaggacgcacaggccactattcacagagaaatttccttttcacaactcggccaattctttaaagtcgacaacgacctcatcttttctcattgtcgatcagtggaaatagtcctagtatataggacaagatggcagacactactgccccatccaccaagcccgtgtccacaattgtgctggacgctggcccgattctcaagaataccccgccgctttcaaccctccttgctcagtgcgacgaaattatcaccaccccctccgtggtgggtgagatccgtgatcccgatgcccgcgcgcgtgtcgagaccctatacctacctttcttgaagcagcgatcccccacacctaagagcttcaatatcgtcagcgaattcgctcgcaagaccggtgaccgttctgtcctgagtaggaccgatattgaggtccttgcccttgcatatgaaatcgagtgcgaaaagaacgatggagactggcggttaagaagcgtccctggacagaagcagatcaatggaaagccccctgtgaaggaggaatccgaagaagtcaagcccgaggatgcggaggtggcagccattacggagggagtgaaggagaccacagtcgcagacgcccaccaacatactccaaaggaggaagaccccacaacgaacgaggctgatgaagtcgccgaggttgttgttgcggttgccgaagaagaagagaaggacgaagagcaggatgtggaggatgatgctgccggtgattctgacgacggagaatggatcacaccatctaactataaaaagcgtcttgctaaggatgagtccgggacagcgactcttaccgctgcgcccaagacaatgcaggttgcgactatgaccactgatttcgcggtaagtacacccacacaacatctgtctatcgcccaattacttatcctgtatagtgtcaaaacgttctcctacaaatgaacctgaaccttctgtctaccaccaccctccagaagatccagcatcttagaaccttcatcaagcgctgccacgcctgcttcttgaccacaaaggagatgagcaagcagttctgccctcgctgcggcaaggataccctcacccgtgtctcatgcacgaccactgccaacggcgcattcacaatgcacctgaagaagaacatgcagtggaacaagcgcggcaacgtatacagcgttcccaagcccatcgcaggcagcgcgaacggcaagtggaagggcggcggtggccagcgcggatggggtaccgaactcgttcttgccgaagaccagaaggagtatgtccgcgccaaccaggaagaagagcgacgacagcgtcgcgagcgtgatctcatggacgaagactacctgcctggtatcttgactggcgagcgcaacaggactggtggccgtaccaaggtcggtgctggccgcaacgtcaactcgaggaagcgctaaatgtgctgcgtggatgactttgcatcttggttacatgggttggagttttggggcatggaaagaaaaaagttcatctggtcaataccactgtcatggtggttgacggcctttttatgaggaatgaccatgtctttgcttgtgatttacggttgaacatacaatatagccaatccatagggctctttatgaacattttaacaaaatcctcgttgagtacctagatcaggtatcatattctctagaatgtctaggtgaagccctgaatagattatccaaggatagcaaaacaagtatggacatctcagccatccgttgaccgcaagaaaaacaccattcgccaaaacatgggctatgccacccggtaattcatttttcccagtgttgttccatttaagccttagcagaggcctctgaaagacgcaaagttagcttcatgtacttctgagagagcggagttctggaaggagagatgcgacgtactggattgctgggtgaggagaagaccgtaacgcttcttcagagtgacacggtgactgggaaagaggtcagtttccaatgcttcattatgcgccatgtacaataacaccgctactcaccgagagtacttgtcatcgggggagaagcgagcggggtgggcagacttggtgacttcgccgttcaggacctataattgccaaagattagtataatcgtccaaagttgaaactgtgatctgaggagccacatgttcgctgaaaagcggcaggctccccggcgtaaagttttccgtaccttcttcaaggtgtagacacgcttgccttcgttgtcgagggtgtactgttcgtcaaaaaattagcgactgatctccgagcggagctgaagattcgctcgcttcgatgtcgcaacgaaacataccataagatgcattctggaaatagcaagattagcatatgagcaatgaatatgactttcaatacgaattagaaactcacttggcgatatttgataaattgtcctgtgttagtacttgcgtcggcgataagtggaggaatttttttctgaacgaggaagagctcggaccaggttgcttagtcacggcgtgctttttaaacggagctttcgaccacaaaatttcctttttctctcgcacttgagcagagaagagaataatatctcttaaatgacttttgagctctgttaatgtgcagagccatgaagtatcattcactaattgacacttgattcaggttgttcatacatacagagacttttaggtaagatgctcctcagctcttttacactctccagcccatccttcaccttcggtgatgacaccatttatttagctcaggcaggcgacactttgatttctagttgcctgtcaatgattgctgaattgactacaacggtatctgagaagatattaccatgacgattgattcgctcgcatgttatagcacaagtcgctaacctcgaattttgtgtttaggactttgaatattttcttatccagtagcggttcccaggatgaccactccagtaaccaccatggacaaacctgtggctgccaagtcagggcctgcatcagatgcgcgtccgcctcgtgcccctcgacctcctaggccaaactacagacagattcaccagtttcctcttccggtcaatgtacatcacgttcctcctgtaatccctcataaccctctttctcttataagcgttgctctctcgtacctcacattccttatctcgccaccccgtcaagaagtctactcggcctactttgacaaaactacctcatcgatccatgtcacggacgagaggtccattaatgccttatggcagatggggttcttcggcaagggtagtctcagtcgaagtgaacccagctggctggcgcgagagaaaaaacgaagagggttacataatgggaagaccagcgaggagatgacaagactgcggcggactgaacgtcgtgaactgaagctagagcgtgcccgcatggagaagctggccattgaggaaagactcaaagccgaggcggctgctagggaagctggcgtttctgagcctcttgaccaagctgcacaatcaacacccacagacgatacgactaacgtcacagcggctacaacggagaagttctccttgaagaaagcaaaagaagctcggatgctggaggaaaagaaggcacgggagttggctgcacaaaatgcggctcttgctgaacaaaaccaacccgagacctcgtctaacaacaaatccgtgcgcttttcacccattgtgcaaaagaaagaatttctatccacctcgccctcatcattacaattgcctgattcagtcgtcgacaacctcgattcagatgacttcccaaatgaagagcatcttcaactctccaacgaagaggcattcttccttgcctactcgcttggtgcattgcaaatctacgattcgccctcgaaattgggtgaggtccaatcaacctcgtcaatcaccacctctgcccttctccaacagttctgccaccactccttccaacctgcccgtgacgcctccgcgtccctcctaccagatgatcccttcatgatctcctacaccgtctaccatcacttccggtctctcgggtgggttatccgctccggagtcaagttcggaacagattacctgctctacaaccgcggaccggtcttctcccacgccgaattcgcagttgtcatcattccttcctacacccacccttactggtccgaaacagaagaacggaagaactacacaggagagaagcaggcgaggagttggtggtggatgcacagtgtcagccgtgtgcaggctcaggtgttgaagagcttggtcgtctgctatgtggatgtgcctccaccagctgcttcgctcgatgatattggggcgctgtttggtcaatacaaggtgcgcgagttcctcatcaagagatggattccgaaccgcactcgtgattgattgcctcgctttcttttggatcccctcaaggcggggaatattaagggcttctgataccctctctgtaattatgttgctcgcagtactgtacaaatgcattaccgttgcataatgacccatgaaatccatgtcttatttcttacttggttccaatcgaagtagtaaactacctaactatgtactttgtatatgtgtgcataatcaaatgtccaaccttggaacgctgttgagagtgccttcatggcgctagtccgtaaagggtaatattacttcgaggcacgtgacacgcgtttcgcgttttaacgcctccatctacatttacgtctcgatgcaaggcatttgaagtgtcggactgtgttggggcgaactctacaaaggctgctgttgctatcaagacgtgctaggcttcagggactttatgtcgtcgaaaaatggagacccaggacgatagcatcgaccttgcaaagttgcaacgcgacgcgttggggctagtatgtaatgaccctgcagcgtccctcgccctcattggactaactccgacatccccaggagcacgatccatctcagccgtacttttcgagatctgcaaaaacaggtaacaagccgaatcacacactttgttacacataccacacagtcaacggcgcttccaatggtgacggggtgtgcaccggccaacacctacctccgaaaacaccatcgaaccccacgagccttgtgcaccaacaccaactacctcggtctcgacctcggcagcatgaacgacgcccaataatgtctgataagcgtgacaatgaactgggtattgtaccgggttcgcaattcggcaacatgagctccgcagaggctgctcctggggacactcaagtcgtctcgcagtcagtgtacgacagcattatcagacagaatggggagtccatgcagcaggattattcacaaacaggggccgacggagcgacattgagaacattgcatgagggtgacagcggccatatcgacctcctctccgaattggacgccacgcaccatggagcgaacctatcccaaggcgaagatgataacgacgacgagagcaccttcgatcaaaacgagtcttccccgatggcctacgcaccggatctcttccccgaatcgcaacgcttcctagcagaaacacccggaaccgtgatgaaaaagaatgaggcaaaaggtgggacaacagagaccccgagcatctcgcggaatcccctggctagtggcatcgagtcaagtggcggtcttctcggtctgagccaggttttcggggctacccaggtcccatcctctcccattgtccacggcctgcaggcggaacttgtatcggatcgtccgtcgcccaatatcccgattcaacccgctcgtgttgtcaatggtatttcgtcgccgttgatgggcatgccggtccagtttatgagagaatcatcggaacccaacatgaactatatatcgatgaaggaatcgcagacaaagcgcgacaggactttgggggagaggttgacacggtcggccggcaatatccagtcggaccagagtgacaaggaattctataaagagtcgagctttgtagaacgtgcacggcgacagcgacagatcgatgaggaagctgcggctcagttcgccggactgagtgctcctgccagatctacatccaatctctccgccagactacggacttctcccaagcagccaggtagacggcaagaccaggaaatgatagaagctgttgccagcgaggaagaaaccgaacaagaagaagatatgcaagtgccccggtcacaagagcttcctcaatcttcagtcgaagaagacaaagagaactacgacggacctcctctggatgccgccgccgccagtgcccacgaccgactatctcaggtacttgggtttgagccgattccctccccttcccggatgggagtagacgaggaaatggagaatggaatgggtcacggaggctcctttggctcccacagtggtggacagccgaacggtgctatgcgttcttcccaggccatggtgaaagactctcaaccatcacctcaatcatcaccaaaatgcacagaaaccgacaatactagggaaattgctcatcgctcgccttcgtgttctcatgtggattctcccgcacgagaccgtcttcagatctcctctccctgctcgcgaccacagtcaagacattcgaacagcaatacccagagaaatggctccgtgtcagatgaaccttcccttcaacccgttcagggtgcgtcccttaacgagaatatgcctacacactctagcaatccctcggagcagcaagttgtaaactcatctcattccaaagttggagcgggaactgcggcaaactcatcatcgatgccatcccgtgtggctgagacacctatgaatcaacgtctcaagcatctcagtgatatggctcgattaacgagtatcccagaaacaagtcccagtcactcccagtgtaattccgaggttgggtccaatggcgatgggctgaacaacgaagacgacgatcttccacccatgttcagtgaaatccccagtgttcgaaagaatcatgtccgcccagctgggacaagggcactctcttcgcctctcaagaaactgctgtccagtccaggaggaggccaacgcagggctttgactgaaattgcagcagatctctcgccacaggttggggcaggagggtttgatatgggaattgggatctttaccactgaggatcaagagttcagagccttgatcgatggatcgccgacccaaccgaagaagaagcggcgtggcaataatggctcaagttacattgcctctgaccctatcatacctctaacccctcgcgcacagcccccaaaatccgttgcacccattcgagcaacacaagaaggaccagctcctattcctgcggattcggatgatgtgcctttggtgcaactccccgaaaaagccgtgcgaagacaatcaaagcccccgcgacgagccccggagaatgtttgggaaatcgagggatcgcctgagcagcccgtccgccggaaatcaagaattagcaagacctctacatcgatgtctacccaagagaatcatgtcccaataaagagctccggacttactgggagatcagccccccaaccaaaggttgtagtttataaacagccaccacctccatcatcggaactcacggaggtctcatcaacaattgcttcggaagatataattgagtcagaggcgaacagtgttgatgactcccctaccacgcctcgcccatcccacacttcattggaaaataccgtggttgccccaagtcaggtcctttctgtctggatgggccagaaacgagcatactacccagcaacatgcttcgggacaccactgggtgtatcacaagttaaatactctgtgaaatttgaggacagtcttcctgtcgaggtgcccaagggtgccgttaagagatttgagcttcgtgtcggagacggtgtcaagattgagatggataatgttccaaaagtcactcatatcgtccgcgggttcggtgacaagctcactagagaacagctggctaaagccgcggacgatggcctttatcctataaccgacatttacggtcacaccactgtgatagtcggtcccaagcaacgcaaaagcctaccaaatggtgggattggcaacagcgagaacgtgatcaaagtgcctattgctcgtgtctatcttgatacgatcctgtggaatcaactcaaagaccggatgttcacatatcgcccggcgcctgttcaacaagagagcacggtgcacaccccatccgaaatgtcatccgcgcctgcttctcccagctctcgcttgtcccgcagcattcaccaaggcagcggcatcttcgctgggatggtatttgctgtctcttacaaggaggacgaagcatctaagaatcgtgtgactaggctgattatggagaatgggggcactgtattacatgatggatttactgaattgttcgaggcttcgtcaattgttcccgttgatactcccacaaaaggtggggccaagaatgcagacctcaataacaaggggctccgtcttacagctcttgctgaagacgttggctttgcctgcttaattgccgatacccattctcggcgagaaaaatacatgcaagcactggcattgaacctcccatgtctggccgggcggtgggtagaggactgcatcacgcagggtcgcgtcctcgactgggatatctacctcctcccagccggcgactcaatgtacctcaatggagcgacaaaatccagagtcatggctcccaaccctccatccacagcccgtctctccgaaactatctccgcacggacgaagttgctagcagggcaatcagtgctcctcgtcatgggccgtggaaaggcagaggaaaagaggaaagcctatatcttcctgacttacgccctaggggcttcccgggttgagcgtgtccctgatctcggcacggccagggccttgatagactcgcagtccgatgccggtttgtcgactagctgggactggatttatgttgatgatgcagatcaagctgctgcaaagtcgatgttgatgcctaaaccgaagacgcagagaattcacttgttccatgggaagaagcgtaggaagtcgattgcatcgtccactcctacgccacctaatgagctgaaatgtactgcgagggttgttggtaatgagtttgtttgtcagagtttgattttagggcgcttgtttgaggagtgatttcttgtgctcgttcttgataccaatgtcatctatcatatttattctttaatgaatctattcggacttccatttcctatgagattactactcgctctagttagatgttaggtagattaacgactcaccaccgaagataattggggtgtaatgtctctaaatagaatattgcctttggattcattgtgacctcgtatctgaaggagtgttcaccacgttatacatggattctacatccacccttatgtcctaaagtcatgttgatgtcggatctcatgcaattcaatgaaatattagaaccgtacggactgtttgcccctttcttgaatgattctttgtctggcttccacttaagatctagcatatatctacttgttctactatgtagatcaatagtttcccttcttcatatcgctaccccatggtattatattcccgcagaagtttactccagccaacctctctatacatcaggcttaccttgcatacttccttaacaatttcctctccgtccctttcaccgggattcaagccccaagttacttggctggacttgatgttctaatcagacgatggattgcttcttttgcttgccccccacttgcctctctttcgacttgcagcaaaatacgcaaaacatcatcttctctctctcacgcagcttcttatcggtcacaccgccatcttctactcttgctatcacaactcgttctccgattccatcccgactcatctgactgaccaaggtgcaaatgaaattgtattgttctctgtaagatctcaacacacgatcgctagctacctcagaagtgcaaagtgactgacggcgggaagaaatgccatacagtggagagcctgtgatctccggatacaagccttggaaagacgtgtactaggtatcgcgcaacgacttactcgacttgaagaggcggagatggaagatgacgggctgtggaaaggaattcggagatctccctactaggaactcaactcgcacacttgaggtccggcgcacccatgagctgttcctagggaaagctagcccattctagtaattcccaccttcgcccacgctcgtcttcgatcccggcatccggcaaattgtcaatacattatatatttacatatatattggagggaatcacaaacctaagtctctggtttccttcacagcacgaacgcgttgaagagcgtgatgacgaacagtcaaggaaagcagatcacgaaagacgaattctctagtgacgtttctaccaaggaaagagattatctatgggaatatataacggacgggcagtcagaaaatcaaccctgaacaatgacccgcacgcacagcaacagtgggattcagcgtcaaaagaggagcatcgccttctacgttgcttatgggaccgcaataagatggacgccggcgagatgccgcaaaggttcaaattgggccaatactgcaaataggttcaagatcggctttagaaatcccctccctttcaagcaagtgatagccggaccctcaactgccaagcttccactcctcccaacagagttggatatcgtcttgctccggcccgcagataccaataagcacccaggcatgcgtcgccaattcattcaagacttccgcgtacgacgacagggcgtttcccaatggcttcggtccctccaggagaatacgtatggtatcggggcatcgccgtctcgtgtgatcgggtccaggagctcccggaagatggtagagtactagatcaagtacttacccaggacattagcgtcgtttcccaggagtccgctactaacgatggcggtacggtgtcagatatcgatacgccggtggtctcggccgtgccaaacttcctccctgaccactccgagatcgatagcatccggcggatggcagggccccatctcacctgaaaatgcctccctgccggagcacccctctcgttgacttcaacgtctcagaaccgctattgtccgtagctttccccaccctattcccgcgcggaggcgccgttgtgacgcctcgcccaagacatgtgccatatcgtgactatatccgacatttgataaagcacgagtctggccgatttgcgcggcatccacggttccagttcgtggcgtccaacactccatgggattcttgtgcgtcaacacgcccatccagagcccgatatggcttctgcgctgacgacgaaatcctaccgacgacacgtcatttttcgatcataaataaaacgcacagatggaactggcttggtacacagacaaacacaagctcccctactatgacaaaatcgagttcgacgagcatggatggttgatcaccccgccaggtgactaccgattatcggacgccctggttttcttgatcgttgggcagaacatcgtcgtcgcaagaaaccgccatggtaaatggccgacgggcttcagctcggacggtgacatttaccccgatcgatggctggtgggcgagccagttattgtgtgggcgcatgagctcccattcattccgatattcgccgattattacgccctagtcggcttctcagaagcaaggcgacttgtttctagagtcaacggccttggttccggtatcaagtttaaggccgactacttgtgaggcggaatccctcgggcaaagcacgcgaaaattgtccaaaagcaaaaagaacaatggttgaagttgtaggagcaccacctgataagaaggtgtctctgtgcattgcgtgaacccctggtctgagggccaacagcctcagagcttcttccgatcagatcaaagctgcacaatacacgtcgaagctacacacaatcggcagaactggagctgagcgatcattttgctcgacctcggcgttgaaccgcacacctgagaagcctttcgttgctgatgaggcgaacaaaactcctctgcttggggcatgctcccgttctctgaactgctccttctcattttgaatatctatttattcttacaggaaaccaatatgacaaacactattataacaaagccttgagtaatcagcgattcgtactaggggtagtctctttgctgccagacaggcgctcggtagcgggcataggcccggtgatatttgtctcatgagtggtatcgtaggtgtcttcagttgcgggttctttgcctttaggctccagttgtgcacttggctccacatccgaaacttgatcagcagtagctctaagctcgggcatgtttgacgtatgcgtgtcgtgggtagtttggttggatgctccctccgtatctagctcaatagctggtttacttccagcagctggcgtcggttcctgggcatctcgttcatgaggtacaccgtgaggatctctaatgggtaattctgcagttccaggcgtctgctctgcgcttgactcgacagctgctggctgatcagcagcgggtaccaaagccccccgtggttgcccgtcagggggttgcgtagaagcctcgggattatgttcgcacggctgttcagtgccctcggtggctggtgccgcaggtgcgtcgatacggaagaactccccgttcaaaacctcgatgagggctcccgcctcaggtggtggtggaattgagccgctcagtagctccttcgctcgaatcttccgcccatacagctttttgtttgcatccgcacgctcggcaagtacaccaccctcgactgtaaggccgccgtacaatccccgagtcttggagtaggcgaagactccagtcgcacccttggtaccgactacacccccagcctcagcgctccgaccaataggcccgacagccatggatatattcccaccaagagtcaagtttcccgactgcatgaatgtcttcactgcggcatcagtagtcagaacgaacacgaaatcggttaattctgcaccaaattgaccaccagcgccgaggccgcccattgccatggctgacggggcggaccagctgccatctgggagacgagcgacaatcagtcccgacccaaagcggatagagcccaggaatccgaatctgaacgctgtgaatatggcgatcccctggcataaagtaagtcacgatcgcttaggttatttcctagtagtattatcccttaccttggctcccgcgaatatctttcgtgggatttctccatcgattttgagcttcgggttgatgaaggattcgagaatcgcagcggcctttttgcactcacctgtggaacacggtcagcctggagtcgaccatgtggggtaacagtagcacggggaataatacttgatagcgaggcaggcaacgggttgtgcaacgggttcttcatggaagatatcttttgtcccgctgatgcggtgtgtattaagatgtctacgtctagcagtgtcaggtatggtctcctatatttggagcaggctgagcagactcgaatggaagaaagaaatgatactcagccgcctccgggagcctacgcaaatccaagtgatggttccaaggttgttcttgcaatgtcgtataatcaggggttttggcgcttactttgcgcacggacgtttcacggggttagtatactttgcggttggaacagaaatggacgtgaaggttcatcggattctaaataatcttatgcataagttctattttgaaactctcctatgtctggtgaaatgttagttatgttgcactgtgttgatttagacgaaactgccaagtatttagggcttcggaagatggagtatgcagtgatatatatcatgttacttggccgacgatcaatgacccctagagagtagtaattgctctaaaatgagactcaatgttcgtgcgcagcttgacgaattgattcgcatagctttaaacagaccagtcaccctagtaggtcatctcgggatggtttatgcaaggtacagattaacattgcgggtcgaaagcaggtacagagtacttcatagctgggacgaaaatataaacattctcggagggattattcattctctataattaagatacggactacacatgtaatgtaacgttgaggttgagaatcagaagtacccaggtaaagttcgtctatcacatccatggatagggctggcgggccgcggttatgcttaattttgagccaccaggtgggtgcacttatctaggtagtcgggtacccggataacggagattgctgtgcattgggataattcaatacaatgaaaccagaatttactgcatgcctcaagaccgcaagctcttcggaaatgagcctacttcagtgcaacagttgcaatgttccggtcgagaattgtacatatcggttctgtttcgctgtaatacggccgcatcttgcctcaagtttccagcggttgcaccattatcacctatgctgttccagaccactctggtcctcctcgtactccaggcgagtaccgtggcatccgtgcctgcggaacgacgcgcaattcccatcgcggaccaaacctttgactatgtagtcgttggtggcggtaccgccggaagcgtgatcgcgacgcgactagcacagaatgacttcgacgttgcgctgattgaagcagggggatactatgagcttgggtctgtggctgagtttcctgcagctgctgcattgacgatgggatcagatcctgctttcagctcaccggtggattggggctttgtgacaagagatcaaccgggtgctaataggcgggcaattcatgtcacccggggaaaatgtctcggggggtcgtaggtgtttttccaaacctgacatatcagatcgaagctgacttcactccaggtcggcgttgaatttcatggtctaccaacggtaaaggaccaaggactctgaatactcagcttaactaactaggatcatccagtccgacacgtgagtctatggagctatgggcagctacagtcaatgacagcagttacacattcgatgaagtgctcccattctaccagaagagcgtccagttcacgcccccgaacactgactacagagctccaaatgcctccgcggactatgatatcaatgcatacgattcggatggtggcccattacaggtgtcgtatgctaacttcgctcaacctttctcgtcatggatgagcctcggtatggaggctatcggcattgatcaagtagatgactttaacctgggcaatataatggggactcagtattgtgcatcgaccatcaacgcatccacccagctcagaagcagctccgagtcatctttcctaaacaagatcacgcccgactcactgacaacctatacaaatacccttgccaagaaggttgtctttgatcaaaacaaaagagcaacaggagtacaagtgaaaggcttgctgggcaataccatcactctttcagcatcagaagaggttatcctctcggccggtgcctttcagtccccgcaactcctcatggtgtctggcattggaccgcccgaccaattacaagagcatggaatcaacatcatagccaatcgaccaggggtcggtcagaacatgtgggatcacccgttctttgctccttcgtaccgtgtgcgggtgacaacattcactaaatttgctacgaatctgctatacgcggctggccaaattgtcgatgcgctagtcgccaaaaatggattcgtcaccaatccaatcgcggacttcgtggccttcgagaagattccgctcttcttccgctcggctttctctgagcgaacgcaccgtaaattagccggatttccatccgactggcctgaagcagaggtgagagaaatattccctcacatagagagaaaggtgtataacacgtgaggttatagtacatatccggcgcagggtatatcggcaatgtgtcaaatctcctggcaaaccagccaagggatggataccagtatgcctcgatactcggtattctgattacacctatgtcccgaggaaatgtcactttgaagtccgcagatacctcagatctgccaatgatcaatcccaattggctcgatgacaaggctgatcaggaagttgtcattgccatgttcaggcgaatacgccaggctttccagagtgaagctatgaggcccgtggtcatcggcgaggagtataaccccgggccacaggtccagtccgatgaacagatcctcgagtttatcaaggataatgtgatgaccatttggcacccgagttgtacttgcaagatgggaacttcccgtgatgatatggctgtggttgactctcaggcccgggtttatggagtgaatggactgcgagtagttgatgctagcgcatttcctttccttcctcctggtcatccccagtcgacggtttgtatgtttctctcggttactgctctggtttaccaagtgctaactgcatcatagatatgcttgccgagaagatcgcggcggatattatccgggattcccaagtgccttaatttcgattcagaggcgagtggagaaggatccaatggctttagatacatgtttctaaattgacatttagataataaattaccttgtcgattggctttgctgggctgtgctaatgccaactatgggaggcacactttatacatcagcatgccatggaatgggcttgaaaatggcgattgcacgccaatatatccgtaaagaaagaaggggaaaggtaataaacgtgggaaagttgatgggtaaatgctctttctataatacagtgaacaccagatacaaatcctcatatcgctacagaaacccagaagttattggaacaagacatcatacacacggcaaatgtcctcatttcttggccgtcttcttcttgcccttcaaactcttcagctgagcagcccgctcggctctctgctggcgcttcctccacgccaaccaacggttaccacggtcatgtggcatagcagtgataccagccctctcggcagcccgaccaatctcccagttagcctcacggtacatgtagccagggcgcagctgggggccagacgcagcctcgacagcctcgacatccgccacacgaacaccgttctcatcaacagaagcaacgagatcagactgagcctcgacgcgttcggccatcggcacaggggccatgttcagcttacgccggctgggcgcattgcgagggtgcggaagctgctcatccttgtcgaaaacaactccgatataccggcgcttcgagtgcttcagcgggtcgaggtagtagcgcacgtagccagcctgtgttgcatagattgtgtggtcccgtcccatcccgcagttctcaccggggaaccatagcgagcctctctgccggaaaatgatgcatcccggtaccacgtactcgccgcccgtgcgcttcgctccgagacgcttaccggccggatcacgtgagtgtcgattggccgttccttgcgaggcgtgtgaggcgtgacgcacttgtgtgaatgggagaagtgcgctggagagggagggtgttggtgtggttttcgggaatgtgggtgttgcggagagggtgcgcaggagggattgcgattgcgagagcgcgggtgtcgaccggattgtcggggtaaaggctcgctccagcgcccgcaggggcgttagcactcggggcttgaacatggtaggttgtaattggagtgtttggaggtgtagatcgtgaagctccaaaggggaagtttttcgttcggagatcgggcttggcgtcacgtgtgtacccgtaagctggcttcatctatacaccaactcgaactcgttctactttctatacaaatacttgattctgcaaatatcgtgtgattattcaaattatgttgcaaagctggcgccaagccctctgggctcttctccttctcgtgtctgtcgcccaggcccaattcaacttcttcgaccagatgttcggaggcggcgagcaacaacgccaacagcagcggtcgcagaacagtcccagtgacagtgaccggtaccaacagatgtggaatggaggtaagacccaaaataactgtctactgagaacatgctgtcgcaagtccacatcgccctcgggtccacataactgactatcatgatctctttatagcacaatgcgaccactacctctgccctggaactcttgcttgtgtacacttcccacaccactgtccatgcccccaccctgatgtcgaggagaaggtcgaacttggagaaggaagtgctgtttgtgtttcgaagggaggcttcaaggcaggcgaagctgcgcggaaaattgaattggctcgcaagggtcttttgtgaagactttgggcatatgctctttgctttatataagaaacgcatacagctcccgtgggttgtgatcaagtcatggagcttggtgccgctggacggattaatccgataaaattactatgaatcttttttggacatactcagatgtgcttcaaacttggcaagcttacttcgtatatggaaacggacgcctgtaagctcgtatcgaatctagtgactctatctaagacatgccaatgtgctcattggtctactatgtatacgtattcgaggcgacttgagatgcgatttctcatgcctggaaaagcacccatcagtgatcctcataaataattgaataactaatattggattgacctggaaataatctggatgtcacagaaatataaccccatgcctcaagtaagagtacacgatctacaaagcaattgtcgtcgctatctccgattatctccgcagtggccttccgtcatcggttcctcagcctctcggcggtggagtccacgggttacttaccaacttcgcatcctatcagtcttttgcctcaacccttacgtttaagctaatctggtccctctcaactaccatgtggggtctaaggctccgactcctgcaaaagcagtggacaccagcgcgaactcgagctctttcaagcttcagaagtcatgaattgcggcgtggtcctcgtaatagcataaaaagaccaaatcccatacagtcttcgaagaaagtcgaaacctcggctcaacctgaacctgctgcctccgagtcccaagataccacaagtcccaattatgacccttcgcaaaacactctgctttctcccgtttacgtgcctgaagatcccagaggtgtgcttaaagaaaaccacccggcaatttcaatactggcgaactcaggtatagtcgtacagcgagaactagagatgatgaatgttatgatgtgagtgctgcgcaagcccatttaagagaaacatgcgtactgactccctcagtggatttgaacaagcgaataagtatgtcatcatggatgcgcagggaaatcacattggatatatggcagaacaggacaagggattggcaaatacaatggcacggcaatggttccacacccatcgaagtttcgtgacacatgtatttgaccgacaggaaaatgaggttcttagagtaagcgcatgaaatagccatctttgctgtgattttggcttggctgaccatcacagttcaatcgcccgttctcttggatcaactcccaaattcacgtctatgatcctctcgatcaaacgccaaatgcttcctcggcatccacctctattcaaagctcaacatctggttctctcattgaacctggcacgagttctagcgcaagaatatcccctcttggtctcggtcagatgcgagttatcggcgaagcccagcagcagtgggcgcctttgcggcgaaagtacaatctcttcacgcatcaccagtcccccaaccccgaaacagacatgggaacccgtggtttctcgctatctgactctggtttatcacaagcacagcagatgcaactggcgcggacgcccgaccaaaatgagggtatattcaaccaatttgcctacgttgatgagccgtttctatcatgggatttctccctgaaatcagcagacgatcagttgattggatccgtcaatcgcgatttcgcaggctttgcgcgcgagatcttcacagacaccggtgtctatgcaatgcgaatggattctgcagctctcggcacaaagacatcaaccaacagaaatctaggcatgaccctcgaccaacgtgctgttatgttggctacagctgtaagtattgatttcgattacttcagccgtcaacgaggtggccttggtatatttccgcccgggttccctatgggcggccaggctcccgctggcggtgcagctgcagaaggcgctaccgccggtgaagccggggctgttggtggagccgctgctgggacacttgagcgagttgggaccgccggtggtgcgccaaatggtatggtctccggtgctaccaccgcaggtgcaatggctgggtatgaagcaatgcagaggggggccagcacaaccgaccccaacgcaccaccatcggagccagtagacccgggatcacaaggcttccaggatcaacctcaagacccttggggtgcagacgatccttggggtgacggaggtgacattggtgatgggggtgacggtgattattttgactggtgatgagggtcagtttctgtactataaattaacgatttagatgtaatatttgctcttaaaccaagaatattgtcattcactttggccttgtcttccctaaatacatgttccccaacggtatcgccacgcctcgtccaccgccccggaattattccatccccaccatttatcccacccaagcccccgcagacaaccctgccacctaagtatttccagaacgcatttcgcttttgaatcaattaaacagcgaaaatggcgtccaccgtcgctcagaagcgccttttccacgaatacaagaacctctccaccaacccaccagagggtatcaccgcagggcccgtctccgaagatgacatgttttattgggaagccctgatccaaggcccggaagaaacccccttcgagggcggcgtcttcgcagcggaactaaagttcccaagggactaccccttgagcccgccgacgatgaagtttatcggaggtggcgtatggcacccgaacggtacgtgacagagacagagacttgcgactggccacttgctcgcattactcaacgcacaatggcaaacacattacttatgcaatcggaatacagtataccccaacggaaccgtctgcatttccatccttcatccccccggcgacgacccaaaccactacgaacacgcctcggagcgctggtctcccatccagagcgtggagaagatcctcatctctgtcatgagcatgcttgccgagccgaatgacgagagccccgccaatgtcgaggctgctaagatgtggcgcgagcggagagccgagtacgagcagaaggttagggacgaggtgaagaagggcctggggctgtgagtcgggttggactgtggttgaatgcctcggttatctcgctgctgcacatacggatgtctgtcaatatggtctgcttgtgctgcgcgggagtcaaggtttgatgactggcgttcgagggtttcttttttctctttgcatggtttggatatgagatggcttctcggtctgtgcttctcggtctgtacagtgcattcttatcctcgcattatgatagcgcattaaatacatgcagaatttcgatacactgttctgttctctttttccgacttgctaaatttgcatctgatttagtactctcttcaaatgttgtctcgtttacctactggagtattggagatccttggcaagtattatggaatatcgctcctgtctttattttatgtggtctatgcatctatgccttcctagatatacatatcctacagcattttactcctgccgaaacatcctccgattaatccacccttccaaacccccttgacatccatacaagatctcaatctccgccttcagattcaaaaccagcattcgctgcaattcagcacgccattctggctccggtccatcgctcgcccagacaggactgttccgaagcatagccataattttcttgcggtctcgcattgtcaacgaaagaagagccgtgtcaccgagtacctccggcactgctatgatatccgacacgcgaagaccaagccattgcagcctcggtatactgagacgagcattttggtgcaagttggccgccgagccgtacttgtacgtcgacatgatggccataccatggggatcaccatcggtgagcgcatagaaacggggcggacgtctgctctgcttggacgcggagtcggacattgcacgcaggaacgttcgtgtcatgaaatcggggtatcctttaccctgttggagtaacgttgagtccagttactcgtctgcgggacagcatatgctaaatcagagacgcagcttaccgtgaccataattccttccccggctagtgctctggtgtggtaacttattcgcgcgagccggtggaagactgcctgtggacaggggctcagcgtactgtcgctgcacatgctgtctttccatactccgtacctctttttcaatgaccagtacccagcggacccgtgaaatgtcgatctcgtctccgtcctctatgcgaggaatcaaactgtcctcggtggcagactgcgcatcgatcaaaatgtgggagccacggatcagccgaaagtctccggtcaccagcccttttgctgctgcttcctagaaagtcgtgcacgatgtcagcagcccgtctttgcagtgctgtggtaccagagcattcggcaggacaaaccacattcaatgctgtcctattcactccgatggtgtacgccaggtcatcaacgatgccgtccacgatatactgcatgcggaagaattccgggtcgatatagtatatgtctctggtgattgtattgatgtgttcagtacaccttccagacgggttcgtggacattgctagctcacctcttggagatcagctggcccgttcgaataacttggtccaatatagctaggattcggaggatgacagctaccagaacacccagactcggtcagttgttatccaggaaggatgtccagttggtgttcggactgtgggaggaggcaagatcttactaaatttccatgcctcatatgccgttttcccaggccaagagtattttctgtatgtatcaattctcggactcgcttccaaagctccggtggttgggttgacaatgcaagcaattgggctggctctgcgcttgagggtgatggaaatgtttgcctctgccggggagcgtgagagttcattgacgagggctgcgagggtgttgtcgatgaattgttggactgaagggtctggaccaccgtctatttccaaattgtggatggttggctcagccattgccgtggatttgagcaagacgagatggttctggggaggacataccagtggacctgtccgggtgtaattgagcttacatgacacaacggtacagggctacctcctatgtacctacctacatgtacataggtactacctagttagtaggtacataactactattacctccatatgtaaatatcaatacccacagtaggtaacaattggattaatactggtaaaagatagaatcacttgacctttgctaggacttgatctatacagatcaagaattggttactttgccatactatatgtccaagattctcttccttttgtatacacatgaccccggggactcaacctgatctcgcagtcatatcctcggagctttgtacacaaccgtacaacatgacatacaagtcgagctaagctcgatatcagcacattccaacaatatccacacctcaaccaagactggagaattgcctatttaggaaatttggataacttcagcgtgacaagatctctacgcagagatttgagattctgcaccttgggaccaaatacagtaatgagataatgtttgctagcagtcttgccaacagagcttgcttcaaatgttctacaactctctcacctgcatatatcctacaggtattgcttctctgcatcttcaatctctcgatcaattcatcaatctccatcgacctcatcatcctcggcatctccacaatctggggatagcttcatttctgccggagcaagccttttccggggaatcttcatcccatcaagattctcatcccagagttaaagacctccctcattccgacctttcatctcttcatcgtcttcctcatcgtcttcatcgtctttcaattaatttgattaatttgtttgcctggaatcacatgattcattctacaccgcagtcgtgatactgatgactaagcttcccctaagcccgcctccagggcttcaggtggtgtttatcgtcttggttacatacatgtatgtagattggcgagaaagacccaatttctcataccatgtcttctactccacatatcgggccatggagaaccccaactgagggtcacctcaccccagatgccaatggagaccttaaaaccgactatacgcgctggcgattggtcgacgaggaaggccgtcaaacatggcggtatctcgaatctgatgcggaaaacaacgaatggccacaatccgtggctgataaatatcacttgggactgccaacggtattcaacccccacacacttgaccgaaattccaatattgacggcgcatatagggtcttccagagctaccagaggccaagacgccattgaaagctgccgagaatggactttcattcttctcgcatctgcagctggagcccggaaactgggcctgcgagtacggtggccctatgttcttgctgccgggtattttgatcacttactacgtgactaatacccccattcctccggaatatgcaacagagatcaagcgttatctgtttgctcgtcagcactcggaggacggtggttggggtctacacatcgaaggccacagctccgttttcggtacttgtatgaactatgtggcactgcgcttgatcggtgtcagcgaagaggatccgcgcatgatcaaagcccggggccttctgcataagtttggaggcgccatctacggccctcactgggctaagttctggctcagcattcttggggtgatggagtgggagggtgtcaacccagttccccctgagatttggttagtcacgcactgcaacatgtacaacctctcttttactaactgacgacataggcttcttcctgactgggttccctttgctccttggcggtggtggattcatatgcgccaggtgttcctcccaatgtcttggctgtggtctaagcaatggtcccatcctctagacgacttgacaagacagctacgcgaggaattgtacacccagccatacagctctgtcgattttgctgcgcatcgcaattcgatccacgaggcggacaattattaccccaagacatggctgttgaatacagctaatgaactgctggttcgggtctggaacccttatcttcgactccctagtattgtcaagcgagctgaggaatggacctgggaattgattcgcatggaagatgagaacaccaaatatgcggggctgggacctgtcaacaacccaatgaatatggtggcttgctttatccacgacggccctgacagttactctgtccgccaacacagggagcggttgaatgactatatgtgggtaaagggcgagggcatgcttgcgaatggaaccaatggcgtgcaagtgtgggacacggcattcgtcacccaggcgatcgtcgtcgctggtttcgctgacgagcccaaatggcggccgatgttgacaaaagctctcgaattccttgacgatcatcaattacgagagaatgtgccagatcaagagaaatgctaccgccagcaccgtaagggcgcttggccgttcagcactaaggatcaagggtacacagttagcgattgcactgccgagggtctccggtcaacacttcagctacaggaaatgcacggcttccctaagctgatccccgaacaacgcttgaaggatgctgttgactgtcttttgcttatgcaaaacccaagcggcggcttctctgagtacgaaattacccgcgcttcacccaaggtcgagtggctcaatgccgcggaggtcttcggcgggatcatgatcagctacgaccacccagagtgcacgactgcgtctgttacagctttgtcactctttagcagattttaccccaaataccgcgccgacgaaatccgcgccgcgaagcagaaggccgtcggctacatcaagcgcgtacagcgcgcggacggtagctggtacggctcgtggggtatctgcttcacctacgcagcgatgttcgcgctcgaaagtttggccagcgttggcgagacatacgaaacgagcgccgactctcgtcgcggttgtgacttcctgattgagaaacagcaggccgatggtggctggggcgagtcatatcttagtagctcgacccatcagtatgttcagcacgaaaagtctcaggtgtgtcacactgcttggtctcttcttgcgcttatggaggcgggctacccgcacaaagaaccgttggagaggggcattaagctgttgatgtctcgccagcagcggaatggcgagtggctacaggaggccattgagggtgtattcaatcagtcttggtgagaccgtcctgatacttactttttttttatttacttactaaccatctttatagcatgatctcgtaccccaactacaagttctactggccgatccgagccttgggcttgtatagtaagaagttcggaaatgcagagctcgtgtaaactatctgaagggaaaataataacattacactatgtacttaatcaataatcaagggtctattgagcagggtgttcaattaatacagacatccaactaatgcactggagtcatagtttccttcccctcacgttcccctcacaaacacaccacgtgatccaaaaatgagcgatcgacaggagcttgggccaccgaggctcattcaaccctcttctctggattgcacatgctttttttcacttaatcaacttctgttccctcatcgtatcaccatgaatgctgcagctcagggtgacatggcctcggccgaatccaactaccccaacgctatcgaacactacacccgcgccttgagcgagctaccccgcgctccggcctactacatctcacgctcgactgcctattcgcgcctcaagcccgaaaatggcggacccaactaccaggctgcgcttaacgatgccgaaattgcgctccagctcgccaaagagcggggaaaccgcgagctgatcatctccgctcagatgcgccgcgccgtctcgctgtaccagcttgagcggtatggagacgcagaatttgcgtttggaattatcgcggagaaaacaaagagccagaaagcgccagagaataagtcggagcaggtgcaggctgctatgggtggacctggatccgggtggggtggccccaggaacaattacagcgcccaaatgccaatttggaccgccaaacttcaacggaagctggcagagttacctaaggacgatccgaagcgcgctgtgtctattgctgaattcccgtcttccgtacatgttccgacggcagatgaaattaaggctcagttgacgggcctcggcgctagcaacaacgtgggagtggccccagcctcgcagcagactgagcctcagccttcagagggatcgaccctatccccagtggaggctattttagcttctcgacttcaaagctcaaacaccagtgctacgtctacctcgaccactccggacagggttcgccatgaatggtatcagtcacgggattctgtggttgtgactctttacgtcaagggaatctcaaaggacaatgttgcagttgatatgaaagcagaatgggttggtgatattgttcccggccattattggactcataactaattctgcaaaaggtttcgctgcaattccccctcccatctggttctgaatacgactttaccctcgacccgctctatgcatctatcaaccccgccgagtccaaagtctcagtcaagagcaccaagattgaactcactctacgaaagatgacatccggccagaactggagtgctctcgaaggttcactcaccgaccgtccagccgagcaaaaggcgccaactaccgcgggcccttcgtatcccacctcttcacgccacggcaccaaggattgggacaaggtcgcatcctcgctcactgagaagaaatcaaaggacaagtcgggggataatgaaaatgtatcggatgacgaaggtggtgatgctgtcgatgggttcttcaagaagctgtatgccaacgctgacccagagacgcgccgggctatgatcaaaagctacaccgaaagccaggggaccacgctgagcacgaactggtctgaggttgcgaaggggaaggtggaagctcgccctgaatgattttccacttgttattttctctcttctcataagccgcatgtagcgaggtgttaccaggtatcgcaacttttcgttgtgagatttgtctcaatttactgattttactgtcttctcccaaattatcttattgatctgagttccgaaaagcaaagtagttcaatttgtaaactccgacctcttagatatgagatcccccttccaaacaccaatagatattcaatttaggacacaacccagccctagcccaagtctgctaacactccagggccctctatcggccaggctccagaatcggtccattgccagtgaccgcaacaggagatccatatccatcctgccggcgcatagtagccatgggagcaccatccaccaattccaggcgaaacagagcaccttcgtcagtaggccaattcatgaaggattccgaacgatacgtctgctcgacaatccgagcaggttggattctccgcatgatccccctgatcctcggtccactgctgtttccacgcttatacacaatccacacatctaccggcttgttgccgaagtgccttttgtctgcgctgtagcgtgcacataactctcgtgcaacacggccctccctaccctcatctgacgaaatgttagagagcaaaaagccttcctcgttggcgattgctatgacagaggatgtgcccattttatgtgcctcgacaccatcgcaagcggaccatttgtccgattcggttctttcaccgaccactatccgcggttcgttcaaaagcccgggcatcgagttggttgtttgggtaaatagtagatagcttgtcttgatcggatgaggtgcttgtaggtggtctttgctaacgtgctttgtatctcgagttgatctctgaatacttctccccatcctgcgatcgaactggagtatatatacccatttcctgtcttactgataaatccatctaaaagttgggctggaaacaacgctgcaaagagtgaaacccaactcaacagcagctttccatatagatatattgttggctgggaggcttccacggatcttatagaccggatatcgtgaatatgggatcgtcgagagaactgagacgaaaggtcttgggtttacaagtcggcttagtcctgtaagtaagtatgtaagtatactcgaaggcaaaatgataggctgtgggcgcttagggctcggactttgtctgacttctattcgttctccgtgaaactcatattggcgccggcccccctacacctcgctagggcttctgtcttttacccatccctgtcccgcaagccataatctgcactggtatggttttgttagtctgttagatcgagacgcctgcgtctcgatggggatggttggctcagcggtaaagttgcatctcccccaggagctggtataccctcatcaagcgcagaatggcgctacgagtatgggatgacacaaaactatgggatatgtttcaggtctaagggtctggcattttgcccatgtcgttgatggttcatggccgaaacgggccaatggtgtatgtccatcccctgcttcgtggatgtatcttcccgtttcgagaactcaacttgcaaatttatactgaccgccagtttacctctctccattactcaaggcgaatgcgtggttcggttggttcacatttagtgaatatctcagagaactgtaatatggtttcgtcgaggccgatgggccgacgtttactttgatgaagaccgcagtgatgcggtattattgagtgcgattatgattatcagaacttgctggcaccaccgaagcccagttacttctatatccatgtataagtggaggcgtcctgcgcagcatcgtaagtcgatatgattggccctgcagctctttcgctctgtctctgttgaggaggagagatgttttgctacggtggacatccatacgtcggttggatatcatatcaggacctcatggttaatagccaggtcagcaacaacgcattggggaatctaaggagtatcctcccttttctaactaaaagacaagcatgggatgtgttggcagttgtttcaaagcatgtgtctcgcctattttctcctttggttaaggctttgggctgttctctcgggaatggatggcctcgtgctcacttccagcgtttagttcatttagttgtagcttcatgtttgtactataatacgcagtttgtagtttcaacttgctttccgctatagaaggttgttacattgtaggtacaaacgatgtaaggggatgggaatataccatattgttctaagccttactattatttactgccgtagaataggagtattgctaggcacaggtactgttgataaggtagctggcagctgaagttccataatatttatttcagaccattcatgtatgtaccgtaacttacatcttattcttggatatctactcttcctcctcatcaattttgccatcgcgatacaggaagaattgtgtaaagatcgccatatccagcagcagcgtgccagcactaccaaccagccaggacaagttcaccaaaatataccggccatacagcgcagccgcctcaccaggacgacaatgcgcacggtgacggcggtgccccagaacctcttcggaagacccatggcaaataggcgagtatgccagaatagagagcacataagtcaagttcccaatgcaagcaaagaggaagaacagcagggaaacaccatccgttgatttgcggcggtagttcaagagaagctggggcaggcgcgagccaaggtacaaaactgcacagaaatagccaaatacttgacccagaacgtccatggtgagaggttccgagtctggcgatgatgactttgctgccgggctgacgaaccagcccatcacacctgccgcacagactagggcgacagccgtggagttgaacaggatggattggagggcggagatgcggcgacggcgggcgcgttgagcacgcagttccgcggaatcggagctgggttccacgaagggcgtcgcgggtgatagatgggtagcgtctaccgacgagtggaagatatcatggtacgacgctgctgagtgccgtcttccggcggaggctggatgtggcccggcttggggttgctgtccagttacgtttgtagctgggtcttgggtttgggcctggccgttgggctttgggatgagggctgatctctctgttggtgctgcttgatcggcgccgttcagctccgcatcggtagtaccgttggctgcgaaaaggtccggtgtggccgagggggatagctcctccctgaggttgaacccccggtagtaaaagcactggcccagcagaacgatatctgctagagtgtaatacactgcaaggatgatcatggtaggaagaacgccttgtaggacggcacctaatatgttgaacacatcgccagccaaccagatgatgaggaagatgagagagaggccatctgcagagccacgtcggaagttctcgatgatctgaggggagaatacgacgacccagcaggcaatagaaatagatctggattggttagtattggattaagaaaaacaaaacataaacatgcaaagatcatcgggccaagtagatctacatccgctgtcacgcatgcatgcattaaatgaatataacagccaatggaaggccaccaaaaatgaaaagaagacaagtacagcttggtgaacttacccgcagatgccgctaagggcctcaatgttaaaattagccgcctgcgaagggaacatcttgcaggcgaaccgtgcgactcagagccaagtactttcaagtactctcaatagaggtttgggaagcgaaacaatgtaaaaatagaatgccaatataaacagatgtaattgctggaagatccagctctgtgcaagttgacaataagggaaaaaggaaataaggcaattggaggtgcgacgagaattggagccatggatgacgtgtgatcacgtgcactagaagtataagaagttcagcaagtagacggcatttcaggagctaatttctttcaattccttctatttcctgcaatatatgaagttacagctcgaataaaatgacatttacttaatcatgaggtatcaaaattcaaagacctatgggtaatgtcccctcataagctgctccaacttatcctgggcatcacagaagatatttatggccttgggctctgtcagcgaagcttaaaggtcgatcagtgtatgtgcttacctcagtcagcttgatctggctagcaccaccctggtctcgggcaaacgtgatctggtagcttccacgatcgttgatgaaagagacaccccgtgccgggataggaagtgtcggcgcaatatcaaacaatgacttgacatttcctgcgtaaggttgtttcaattgcgtcaacagcccaggtgaaatagtaatgtgatccaccccagcaaggaagaagatctcctcgacagaagtcaagctagcggggaggactatggtgcgcgaactgatggactcgtagtatttctgaatagctgcgcaaagcgggagcaatttcgcattgtccacgtaactaaaggggccggattattaggttaggtcttaaagaagagtttgaaacttaccctggttgcacatgcaccttcagttcgttcacatacggtgcgatataagtacagttgacctcagctgcgagtacagcttgagccatgctgaacagagtcgtcgctagagtacgcacaccagctaattcaagtgtttgacaggccatcattccttcccatgtacttggaatcttgatacaaatgcgagacacgtcgaaatcgggctggtaatgctggaacaattgcacgattcctatgattgatatcatcagcatcagatctaaccgagaaagaacgctgtcagtggaaggagtccagcatacggagtgcattgacgataatcttctccgtcgagtacgaatagtaaggattgacctgtacatggacacgtccacgaatgtgtcttgccatttctaaggccaacttaaccatctaataatccatttagtcgacttcttcatcaagtccaccaatgctataatcgaaacacaactcaccgaaatctcgacagccagttcgttcatatccatggagtacttcgcatgcagcactgccgcatctgaccgcgctgagacaatgattgcagatcgctccggcttagaaagctcgccgagtgcaatggcctggacggtcaatttcatggcctaattaagtccacgggtagcacgtccatgtgcttacctggttagaagtgcagtcctggaatgggcccagggttttggcgactagaaagcagtcagcgatctgggaatggtaatataatatctctacgatacacccctggagaaaggccagttgactcaccttcatcatccatggtatcacaatcgaccagcgtgcgcgaacgcatataatcgaggcctgtctgtacagccatcttgagtgtagagtaaatccgagatgatggagagacgaggaaaaagaaaatggaaatggtcatcccacttctccaactccagtatttaatagggtgggggggggggggggtttccgggcctccacactccgcagtcacggatttgtcgggccgagtaacatctttctgattagtatggacttcgcatcaggccctgcactgcatgtgtattgtggtacatgggggatgccggataggatatagctaggtcggacaaatctacggtcataacaattagtgagactattcagcaaatcaagatggtgcttaaagtatcccaatcaggcaatatgcttgtataggacaagaaggatatattccgagacgcctcgcgatgcaaagtggaaatccacccccaaaatacccaatacctatcaaactatttaaaaatcaaatgctctcttttgttgttggctcctatttggcctgggtagccaaccaagcctcatgtgccttcttctgacgctcccagtctttgcggagcttcttcgcccggctcttggtgatctcctcaccggaagcgtcgcgggtaggcatgccttcatcgtcccaggcagtgtattcgctggtacggaacatctccaggtggctcagcttgcccttctccgccttcttgagagcttcctgctggttcttcagcttttcagcctgcttttggcgagcccgagtttccttctcttcccgcgccttgagcatctcctgggtgactggccggactagggcaggttggttctcccgatcttcgagggcgataccaacatcgaagaggtcgatgtctcgcacacggtcgcacagggacagaatatccttgcctatagaatcagaggactccaaagagactaccttgttacggaagttagagaaaagctcagcgtacggcttagcggattcggaagcctcttgtggtgccgacgcttgggcaactgccgcctcgatatccttggcggagattccagccttggatcgtgcggcttcacggagtgtgtcacgcatggccgatagagggtacaggtagggcttggcctcctcggggatatcaataccagaccagccgatttcggtgctatcagccgaggcggtcccgttaagaccgaacatgttcaccatggaggttacccattgggctgcagcttgaacatcctgggagggcacggcggccttgtcggcaatattgaacttggagatgagttccgagatcgatgccatgacagcgggagtgttgaaagaatcacagagctggtcgtgaacggccttcttggccgtttccagatcagcagcaaaggtggtgtcggtacctgatgactggagagcggcaggatccttaaccttgaggaaaaagttgttcaccttctcctcccatgagctgcccgtgtttaccagatcgtctgtgatctcaacaccatccttccagccacccagcaggaagacaatgcgcagacttctcggtgaccagtctttgcgatcaagcgcttctcggatggtagtgaagttcttcaacgacttggacatcttggatccttgaatggacagatggcccatgtgaaggaagtagttaacccattgttcatgcttgtgatcaccgtgccagtatgcctcactctgggccagctcattgtcgtgatgcgggaaggcaagatcaataccaccagagtgaatgtccatctgattgcccagccgggctgatgccatggctgagcattcgatgtgccaaccagggcggcccttgccccaggcactagaccagcttggctcccctggcttggacgacttccagagagcgaaatcggaagcaccgcgcttctctgtcgttttgctggccaacgaaccttcaccctctgcagccaatttgttgtctgatcgactccatggctcaagccgagcgtacgggtggccggccgcttcgaaggcattgatatcaaagtacaccgatccatcctttgtagcatatccgaagttattcttaacaatacgatccacgaaggccgcaatctcatcgccatattcagtcacgcgagtcaactcggtgggatcaagaacgttcaggtcgcgcatatccttagtaaatcgttcctcgtatctcttagtcaacttggtgaagatgctgtgatcgtccgcgtcaaccgatgcacctttcagagcatcgagataaggcagaatgagatcctgcgcgtttgaatagaacgactcagcaaagagagcagggtcggcgctcgagccatggggggtttccgcctgcgcgaagacctttgcggcagacgcagccgtcttgatgtgcatcttaaccttggcctcgtcatcacctgccttctcgtttcctggcaaagctccaccgttcaagatagtcgcgtaggttttttcaacctcattttggtaccgcgccggaggggtttcggggtcgagcaagggaaggttcttctttaagtaggcgacgaaagcgcttttgacggtatctaagacctccgaggtgatcgtagggttggcggtgatgaattcgttaaacaaatgttgttgtctagcgcggaggatgatctataggatcggtgagtcaccgcgcttgaggctgtatccatatacacaaccctgattcataccttgtcgtccacgtctgtaatgttcataacgaagttgacatcgaacttgaagtagtcgcgcataattcggcgaataatatcggtgctaacatagtttcgggcatgtcctaggtgcgcatcgtcgtaaacagtcggtccgcacgcgtaccacacaactttcttgcccgcagagtcgatcgggacgaagggcgtcttggacttggtcaacgagttccacaccttcaatggaggcagttgcgcgtccggactagagggcggttgccgccatggcggctgctggcgagaagacatagacctgaaagaagtgactgacaataaaaaccgctgtttggacggtgaaaagaaagaaaaggaaagaagggagggtcggggggagagcataaagagagaaacaaaggcaatggagggggaggggctcttgtcaggaccagatcgactcatccatcaactgcggactcgctgtgattggcggcaactggggatgggaggaccgagccctgagccctaacgtatggcccgatcaggcaatgagcatgacatactttttttctttgcggagaggcaatgagatctagcaagttagggattgtccacacccattaccctcactgataccgctcaccatgacttccccattcctcacacggaacactatagccgacaaagatagccttgccctcttgcaactccgtcgcgaccagatcgttccgaccatcctccgcgaccatgacgatgagaaccaaggctattgggaaggaaaggtcaccaacacccgcttcggctcgttcccacacagcactctgatcggacagccctggggctcgcagattgtcgcttcgaaagtcgacacaggttcgcgcggtcgcacccaaagcgccaaacgcaaggcagaggagctcgatgccgaggcaacaacaactggcgcagaagaggagaagaagaagccatcattaagagcccccgtctctgcagagagtgggttcctacacatccttgccccgactcccgaagcatggaccatatctcttccacaccgcacgcaggtcgtctacaccccagactacagctacatcctccaccgactccgcgcacgaccggggagtacagtcatcgaagccggagccggcagcggctcgttcacgcacgcctccgcacgcgccgttttcaacgggtatcccgggacagaagaagcgacgaaacggcgacgtctaggcaaggtctgcagtttcgaattccacgaacagcgcgcggccaaagtgcagaaggaactgagagaccacggtctcgacggcatagttgaggctacgcatcgcgatgtctacgaagacggattcctgttgggcgaccccaaaaccggcaaatcacccaaggccaacgccatcttcctggatcttcctgctccctggctcgcactgaaacatctcacgcgcaacccgccacccgggcaggaatccgccctggaccctgagtccccggcttatctgtgcacattctcgccctgtctcgagcaagcagagcgtacaattcgcacaatgcgcaagctatcatggctcaatatttcaatggtggaagtcgcccagcgtcggctagatgtcaagcgggagcgtatcggtctagataccgagggcgttcgtggagctacactgtttcctaagaccgtcgaggaggcagtggcaaagcttcgcagtgatgaacaacgtgccaagctcatccgggataatcgattgaccaaagaccagccagattatcagccgattgcgaaggagacgccgttctataaagagaagacagatgtccccatatatgctcagggtcgcttgacacatcgatcagagcccgacctccgaactcacacctcatacttggtctttgcgatcttgcctcgggcttggtctgaagaagatgagcaaaagtgccgggatcaatggccatctgccaaggtcgttagggccgataatgaaccgaagacaagcaagaagcaaatgaagagacaggctgccatggaacgggcaaagctccgcgaagaacagaagcagtcggcggaaaggccacagccagattcgggagataaggctgaggaagaagagatcaaggaagaagagaccaagcaagaaagcaccgaggcatgagggtgaacctataccagtgatttgtttcattagcataaaagttccacaactagaatggcgttggtggctttgaatacagtctacgtcgcagatatcatttactcaaaggctctttcatcactcgcattgtacgcaatcctggagccaagctggtggtcatcaacctctcggtatcaaaccagcatttgcaatcctctcagaggcagaagttctttagcggtcatgaattgatcgataatccgcttgaacgttaactcgaagccgtttatttacacacgcgaaactggcttggcctaagaagcagtcgtcgtgcaggctacctgagcaaaacaagcgagcgtggatcaatgataatcgagcagcgaggaatgaatactacaggtgatcagaaccgtaaagaaggcaaccgctcatgtggaaattctctataggacaagatgctatcaaagccgccttctagataataaaatcatgaaatgcaataagcgaagtaatgacgacgtcgtcgggtagatggtatcgacagggaaatagaagtgttcagaggttattttcagctctgaacttatcccaggcttcatttagggttccgaacacagatccagcaatcatacgctgctcagtagtggcagtggtagggatctaaccgggaacgttagttggataatcagataaaatgcagctaatgccacccaacaagggagtaaacataccttatcagggtgcaccttggaaatgcccttcatatactgaatcttaaccttattcggcagaaccagctccgacaagccaatcttcttccacccagcctcgggccatagcacagaatccaggctacccagcagcgcgcgcaaattgtcttgcttgccatttctccaggcggcaattttcgcgtcgacgctctcagaaagagcaaatttctcttcgtcggcgcgctcagccgcctgattggcttgccgcagacgactgactgcttcaaagtcagccccagatgctgacgtggctgcgagatcggacatagccgaaggcttcttaggcgggggtgaaggccttttcctagcaggaactgcgggcttagattgaggcttgctgataccagccgctttctcgcaacggttccggccttggatactcgtgctaccaccgtggccagactctacagccagcttccatgtctgtgcggcatcaccccagcgctcgagttgctctagggcttcggctttgcgcatcaaagccttgccaaagaagtctttcatgggcttaggcgcttccccggtgcatagatcgatcgcctccgattcacccttagacgggccgatgaacgttaggatgatgtcggcatcatcaatggcggacttgggttctccgatctttagggctgtcatggcacgattgctgcggatgataatggtgataggatgcttgtcagggagcataccgagagccgtagagaagctctggtgggcttccgcgtagtcacctcttttgtatgagtctgcggcctttccgcggtgccggtgtgttgattgaagtgcctcttgagatacaggcgggatagaccgtgttggggctttagggcgtacggggatagaagctgggcgagtcggaggcgtggcagtctgggctggggtaggaagctttggacgactagccgaaggggcgggagaatcaaagagatcgacggtaggttcagaaggcggtggtggtgcctgcggtcgcttgcgtctcgcaggactaacatatgcttgcgctgtctgctcttcagccgcaaaccgtgaaagtcgagatttaggatcttgagaacttggtcgggatggacgctggaggaagttggcttgctgtcttgattgcacagcaccagggggcgattgattatgaggctggctccttgggtcggggtggctttcacgaggacgagggggtttctgaggccggccatctccagactcgagaagaagcgcttcattagtgaattcctgctgttctcgttgtggttgagccggttgatcaagacgacctggacgctgcggctggagaggaggttcatcttgtggagaggatgcatctctcatccaacgtggctggctggggtcatgctccgcgttgaattcgtttacggcttgttgaaatttcttactgccagtcttccaaagcgagccagctgatttcagtaagttattaccaaattgagaggcaacctgcgcagggtctttgtcccccgatgctggactccgtctatcctgacgtgaccgagattccggcatttcttctctcatccacgaaggccggtcacggttacgactatcgctcctttcagcgcgatcggcaggacgagtcgcactgggatgtccttcggtcttctgtcgagactcggcatgagcctgggtaagaagccaaccaacagcagcctgtacgtcggtcccagactctgtggtattcaaggcccggcgagatttatctgcggggaatcccatatccaccaactccgcaagagcccgatcgacctcgctggaaggcataggagatacatcttggtctcgtcctcgatctgacggtgtggcagatgtgggaggcggttcctggcgtgggatatccgataccggcttcccgagcaaaccaaggaaatcatcatcgtcgccttgttgaggctgaggagcgggagcaggttttggcttcaattgattgaggccgaatgggtcatcgtcatcaaaggcgcccatccccgtgttgtcctgcatgataattccaccattggaaggttctggccgactgttcatgtcgatttgaggcgacgctctcgaagaggtggggactgggaaatgggtcgacgcatccaccggcgctgcagcatcgaacgcggccagaatatcctcatcgtccgtgagcagtggcgcagatcgagaagcaggtacagacgcggggctctgcctacgtccttcaaagttgtcccagaattgattgttctggcctccgtactgcgattcaaatcggctgcgattctcggcttcttttttagccttttcctcctgcaaacgcttctgctgttccatgagagaaaggttcttgtttccggcggaagaattgaatgagaccaggttcgcaaagctatctccggtagaggtggcgggcttggatggcgagcttgagcggttcgaggtcgcggataacggggtagacctgccagagccaccatttgatgatatacttgggtacaagtacccagagctcagtggcggtggtttgcttgggtttttggaatcggaggaccaactcaagccgtttaggtcctccatggtgagcttgtcgcaaaggatagaggtgacgtctggtgggttcgaatgaggattaggtcccaggagagggatgaaggttttccatgatctcaccagctcacaatatgaaagaagcccgaagtaatttcaacgaccgtttgctagcaagcagatgcagagacacttgccccctgcatgtgggggatccagaccgcattgcggccggcacgtgatgctgtggtttcatctcgcgcattttgggatagcttcatttcctttaaatgctgtctggggattatcagtttattatatccaatttctgacattgaggctgaaagcctctcagaaatcgattgcctctaacatgaaaagctagttcgaggcatacgcaatgacgccgatgtgagagatatctcaatctagagaccttcaacttcttcattttttacactatattttgacttataaccaactaaataatcactcaaattgccctcgtcctcgccgtcgattcctaaaagaacatgggaagtattcgcagagatcaccatagttgctccgcccaactgaccccacgaactcggcaaatccgatggttaaatggaaaagagactacctaacaatacaccgacaacgcatggtggatatatatgtcacccctcacccagatccctggtgatggatttgagtaggccaaggcactgagaaaggctctaaacatcttacgccggagagaccatggatctcagttttatcggcaagaggaacgtgcctcggccgttaaagctattcctgtaaaaaggcaaggaacggtctataacagacaggagtgttttgtcaataaagccagctggcacttggtgttcccacggtataagcttttgcgtatttccccaatgcctgtataatgaccagatggggtatccctaaccacagccaaacaacgtacggaatacttactccgtacagatactccgtcctccaaacacgttggcaatctaagcggcagaaagccaaaatctggagaccgcgaagaaacttgccctcgaagatctagacatggcaagccagcggaacttaaactaccattcaatcgtaatggaaagggatttcctggcctccagggcctaaattagttgcagatttcgctaagttagttccatttctacttttggcgaacgcgtatcataccccaattagggacgtcatgggcggaaaatacaatactcggaccagtctagaactattttgtcttttctggaagcatcaaaaaggggtagaggggtagaggggtagttggagatgcaagatctacattattcaccgtaagttgtaatccatatctacatatgtatttacgttctctcaagctacaaatgtacaacataggccgtactcagtatcccgtatgagtcttctttggaagcgtcaataagaggccattgcatcattcgctaaatccatgttcgatcgtttaaggtttagtgaaaagcactaattgagaaaagcttcatgcattagcgcgcaggctaatgaagtttggcaggaagatacgagaatcaagaggaatggcgcaactctcgcggcagtccagtccccatagtgcccaccccctcttcagtaccccgtatagttcggagtaaatgctaaaagatccaagggccacagaacccgccgtctttcaaagccgcttgtccgggaatccgggaatccgaatggactacccaggatgcatgtatgtagtatcaagggcagcagtgcagatttatatagttagacatgcaccacgtgcgtacatcgttaaccctgtatgcacataatccatggctatactatacccagttcccttccgtcccgacgatcctaagttacctttgtacgtattaaaatgctaaagtggaccgaaaggtgcaaataaaaatggtatcgcattgtagcaagaagtactccgtaatgtccggctaaaaataaagagcaaaaagcaaagaagaccagtcgtcacgggggctgatcttgccagattcgatggcgagggagacctcctcctcaatgggctgggcagtcatgctggactcgccagcgacggtctcacggtaagcaacgacggggaacagaaggaccaacaagacaccctaaaatgaagagcaaaaagcaaagaagaccacacaaaaggaccaacaagactccctaggcccgctctacaaagattatcaactcaagggattcggataaggccttgcagcctttatagctgcaggcgaccaactgaatatcctcagactgggtaggaacccgacggcctgtctgggccgagctagaaattgcccccttgatgaagtccgcgctggcatactccactgggatttgctgctgcgcaatctccagtgggagatgcttccatctggcaacccatgcattccaagattctagatctggctcccagacattggtactgtgcatgtctgggtctttaaagaccataatagcgcctccagtccgaatataccccaatgcgaaatgtagggtgttcgcagtgtaaaagcctggaccaaattcattttcagcattctggctacttctctcagggaaaaagcaggccaatgttgattccaatgcgcttaaatttagtccccgaaaccaaagattttctgattcaagcggggcaccgatgagcttcctgatattggcttctagccgattcaggttcttgtcaaaacgtatcttgacacatttaacagggtcctgtgctttgacccgagaggccgggtagagatcgcggagactgtgggtttcaagctcccctttgatggcggtcggtacggtactggtgactgtcgttacgaggggcgaagacatgattggagggttgttgcccgaggcctttgcccatatcatgggcggcactgtcccttcctctgcccgtttgtctactggccacaacaggccagccccgaagggaacgacttcgatatcgtcttcgatgacgtatgcggggtggtcgatggcttggacgagttcgtccaatcccgccagccatgccaggctgcgcaaggggccgatgatttcagtagattctattgtcgtacatgggattagctactgagttcctagataaggaaggacaaaaaaaaagagaaggggggggataaacatacttcgttgcccattctcgtccagccattcttggatgtccgccgggatctcatcttcaggatatccctcgtggtatgtccatataggtctgaaaccatgcttaacgaggttatgatggtttcgtgggtaaccacgagctaggacagcgtcaccctcatcataatcagaatcaaaagtttcctcttcctcatggccgtggccttcatgtgtcggcctttctctatcagccatgctggcgagcgacagtttgtcttcagctaactcgaggaactgcggctgagtggtgcttgcgttatcaataggggttaatggctcgtccgtctttaagctcagcttcaacatcagcttcaacatcagcttcaacatcagcttcaacatcagcagggatagaggcgatcctgtccgcttccgctttgggtttcggagattagataccactttgaccaacttcaataatttgcgagatgggtgcacacagttactatatgatattgttgtgttctatcctctatggtaatcacatgtgcaaacattatggctgttctaaaatggggagctacgtatgtaatctttatctactggcaggagcgacctggagacttgtgagtacgaagacgtaactatgttgtagtatatgtaggcaccagctgccaaaacccttcccgggaagtactgatgccttagtgcctggttttggcctgtgggcctgagttaaaaccgacagaagggttaactagttacctacctaggtagattttgtcaccatccatggatgtatggaaatgaggttttttgcactatacaaatctgtgcatacatttcaattttcaaggctgtttatgtttccatatactcattttgatatacggaggcataacccgccatagaaattggagacgcatggatttgtatagtgccaaaaatccttatttttacaagctcatgatttacattacgttgtacagagctgtgtgtagctgccaagcggtcaaggaccaggccaaaatcgagcatcaaggcatcagtatttcccagaaaaggcagctggcgcctatactagttacgtcttcgtggacctctctattatgcatgtcatacaaacatccatcaatcctgtgagtctcccctctcatttctgagtacaacacccatcagaaatctttgtcttccgtgggctggcttcaccgtcacaaagcataatccaaaatccatctgagacccttccagattgtctcccacactgccgctttctcggttataatgggtgcagctattaccttttttccaacaagactccagtaggtgtcctctgtagacttttgatgatctagatgccggtaagcggttctagtctactactgagcattgctatgttccacttgacttcctcacatcgacaccgcccatcctctatgaacacattcacacttatccgcatctcgagacactcttcacggtcgactcgcttctgcatgctttggatactctttataattttttacccactcatcgcctgtctgaagcctccggaacgtgcaactgtgagagacacgcctgggaaattttcaaacattccaagtcatccttcatggattcttggagaatattttatttgagcttttccaccccctggctaccatgcgcaaactaagaatatcgcggtccaatatcacagccttggtcgggatgttctgtctggctccgcgacctttgcgtacataccaaaccatctgccatttgttccaacatatttccgctgctttatctggtaattgggttcgcgcccattgaaattttgacaacaactgattattcgagattgattgcactttatgattacattattaagaactgcaacacggtgggaggcctttacggagaaagagcgtgcgtgtatagcttttcttattggtttatcccatacctagtaggttaacgaagtccttaaattgatattttataagcaagctaaacaagcgacctaccgaaggtatcttgctatacggagcactttccttggtattgactatgtgccaaatatcagtagcacagcctctaatagccgtatctttagtaaagaactgtcgtagagttgatcgtctattcgtagacctaactccccttttttaggaagagaagccttcagttaatattatccatataagcagtacctagtagggttagattccgtacctaggtaagtaaaagtgataaataatctaagtagattgcgggaattccgtccctaccaaggttcggggattacaaggtcttggcgactctttagtatggcttcaagaggaccaaaaaagacgttaaaaaggatatggaaagaatatgtattagagatgccagtgacaaggccaatcaggctacaccttgttatacttctatactccgtacccaggtaaattgatttacagctccgaaccggatgtatgtatccaaatcgataatctagaccaaagtttaggcctgcatatatattgtatcattattgattatgataccccaatttcagggaaaatccccgcgttgtcgagatcctaaaaatgagtttcctactattgatatactatctagtccttagagcggggtaactataaagagtcctatagtattccaagtgtcttctatgtactccgtactatgtcttgacaatgctatgcaacggagttctccgtgagtatttgtgaccgagaagtgttttacggtagaaaggcaagtcagaactccgctttttctcagaaaaaaacagcggaacctctcgggaggacgagcacgggagcgaatggaaatcaaatcagtggatctttcgcccctgactttcagggctcggacaattaatagtcacttcacacaatactcaattattgtcgccaagtcaatatggatacaatgtactccgtactccgtgcaagttatgatccgttcctagctgccattctcagggaaaagaaaagaaaggaagaaaggaaaagggaaaaaggaagaaaaaaaaaaaaaaagaaaaagaaaaaaaaaacagagttaaactgaaacgacccagcagagtggccaggcccgtgcttcccgttagctgggtccttgcattatcgtataaatcgtgctccgtataaatttgggcttaagtcgggagatgagctaagagttggaatgttacatttaaaggtcgaaggatttcaacgtcatagaagtatcatccttcacacccctgcactctccactatactacatgtatcatgcattgtatctattcgtgacaaataaggatcgagcctgcaattactttataacgtctagacacatttccggaaagaggggcagattgcgatgtgaaaccttgaagtctggccttgagagacgtagttcatatttatacatgggagaagcgacaccttccttttctagctgataggggtaatgctggccaggacacactttgatatccgagtcagttctccggtttccggtgtacggtgtacgttgtacgctgtgcgttgtactttcccatactccgtacaggcgcaccttgggggttttacatatttatgtctgaagtcccagaattattcccctaaaacgcagtctattattaattattacccataataagtgaacttaatccataaaatctcgaacatgcgcttgtttaaccagatatttacaaggaaattaacgcgatgcgcgatagctgaccattcacaccattgaagtacccgaagtgggttcgagattccgtatagggcaagccgtgcctttcatcattttatcattttatcaatttttctttctttttctttttttgcttttttttgttcattgaacggtacgctagtccgtgcatttccgcatgtttcttggtctgatcgaaataatctgcatctgagcgatctatacacgtaccacctggtggcaccttggaccaaaatttacctgatggttccattcccatctctccattctctgagattctccgaggacatgattcgtccattgccacagtgaaatgatagtcccttctcttgctttccgactggcccactccctccgggacccatccccatacctcatacggcaatcggtcctaagctgcgggaatggtactccgcacacaacgcctttgtgtgcacacgtactacagctattattgtagtaggaagtaaaatatactaggcatgtactccaatgtacaatatacaccggtagtcttaaatgcaaatcggcccattgagctaactatgtagttgcgtacccggtactctgtaccggttctgcataaagtacgagttgtggattaaaccacccaatctcgctcttcttctcttcgatccagacttcgccggattccgacagactttaccagagtcaatttcccctaaatcgactccataattatgcaaattattaaccctcggacgtctagcccgtactaaatggcccttgtctaggtaaagagctccagtcatcaagccccataaaaaaaatcaccattattattctacctatttttacttagtttatacccttagagcctttattatgttattttagtaaagggaagggaaaaaataaaaaccagaaaaaaaaaaaaaaaaaaaaaaaaaacatcagaacctccagatgtcacttcccccctctttgtgaactccttatccgaactacctacattctcttcgcccctcctttcgattactccactggcgccccctttcaacctttgagtcccaaggtctggggtgaaactcccaacacacgcaacaatggggctattcaagcgcaaagattcgaagaattccattcaaagcgagaatgagaacgattccttcgtatccgtcaacagcgctcgcacatcaaacacatccctaaggtcgccaggatacaagggaagtggtccaccagcttcaatcccagaactccctatcgccagacccccagacccagcattggacccggctgcatacctacggagcatccatgcagtgcgcgaacgctccaacatcatcctgaacaaggccaaacagaaccaactaaaccatttcgatgtcgacatgagcaaattcgaagctaccgcctcctacgtcgtctccataatcaaggtaaattcagtgaacttctacgatcatctgaagctgcgttaacacgtcttcccaaccagcgagattatgcgccagactatgagaacattccgccgcatggtcgctggcagcatttcgacgttggcggcagaccgcgcatcaaccagctcctccagtcctggcccagtcgcattgatgcgcaggaacgcacacgccgtttgattgatttgtttgtcgtgtctgttctgctcgatgcgggttctgggaacaagtggtcgtaccggtcgaaggagtctggtaaagtcttctcgcgcagtgaaggcttggccgtggcgagtctggagatgttcaagtcgggtcttttcagtagcgatcctacggagccatgccaggtggacggtgcgggactgaaaaaagttacagccgaggtgctcgccaagggaatgcaacattccgaacaaaacccactggccggtattgaaggccgcgcagggttgttgatccggctctccgaggcactcaacaatcaagacttcttcggtgtggatgctcgaccgggaaatatgctaggtaaggcgatctgatctgggtgtgtgcttgatcagctactaacctttactcagattatcttctcggccacccatcaacccttgcttcttccgtaccgattgttccgattaccacgttgtggtccgtgcttatggatggcttctctcccatctggcccccatcacgaacgcagattgatggagtatccattggagatgcttggaagtgctcgggtctccccgaatctcctcctgcaaagcagtgggagagcatcgttccattccacaagctgacacagtggctatgctactcgatcatggttccgatgtcgaaattgatgtccatccacttcgccggtagcgaccttctaacagggcttcctgaatatcgaaacgggggccttcttatcgacctgggactcttgactctgaagccggaagatatgcagcgtgggatcgaggcatataaagagaatgcccagatcaagggtcagccaagtgtcgaagtggcaccgctcttctgcgccgacgacgatgtaattgtcgaatggcgagccgctactgtcgggttcctggacgagctcctagaggaggtcaacgctcagctggggcttaagggctctgaggagccactttcactagcacaaatgcttgaggctggcacctggaaggtaagcacgaagcactcatcgaggatccccagctaagtaaatgctaatgaacctacagggtggtcgcgagattgcggaagtttccagaccaaacaccaaggaaccccctatcatgatacgatctgacggcactgtcttctaataccctctatccccattttaattgcttggatacctgcataccttcgtcccgtcatctggttttgctatttgggacgagcttttttgatgaaatgaactcttcatgaccgaataccttcatacctatatctcacgtttggcttttctcctttttttctaccttttgccttttttttcccctgccaccttgggctttttcctctttttccctctgcatttgaggctattcactgatttaccattggttttgggcggcttatttcatattgcattttgcacattcacatttcaccttttctttttctctgtctattgtttcactttgccctgacgatataaaagccatttgaccatagaagatctgtgatttttcgggagacccatgggatgtcgtcatcccgtaacctcggccccaagctcaaataacaaaactccacaaacaatgactaaatgtgccatccagtgcacaattgtaaagtctcatgacctggatcagtaactaatggaaaatatcaaaatacctatgggcagattgctagactcatcatccgcccaatcctacctaggtaaccttctccaacaagctaacaaacaatcacgtgttctggaacaacattattccgtccccacatcagaaggtcggagctcaccccggggcctgtcacctttccttcttatcttatgcactctcgccctcaatcccattgtcaagactgaagatgctaatattagactcctaactggaatctaataccattgcatctgagtgaccctgtgaaggcactgagttgccctccaggtcgacccgagttatccccgcaagagcggggcattgagctcaacggcaaacccaagaacatcagacaggatggatgctcggaagaagaagagaaaggtgctcttgatgggcaagagtgggtccgggaagtcgtccatgcgctcaattatcttcagcaactacgtcgcaaaggatgtccggcgcctaggtgctacaattgatgtggagcacagccatgtcaagttcatgggtaacctcacattgaatctgtgggattgtggagggtgagtaatgcatactcgacttccaatccgggagtcattccactaacacggaactttcccatctcagacaagatgccttcatggaaacctatctagcctcgcagcgcggcaacatcttctcagatgtcgcagtcctcatctacgtattcgacatcgagtcacgagaagtcgagcgggacctggacacctaccacgcgataatcgaagccctgcgcgaattcagcccaaacgcctacgtcttctgtctcgtgcacaaaatggatctaatccaagccgagcaccgccaacgcatctacgaagagcgctccgcggtaatccgcagccgatctagcgacttccgcgtcgacaccttcgccagcagcatctgggaccaatcgctgtacaaagcctgggccggaatcgtgcacaagctcatcccgaacctagtcgtgatcgagcgcttcctaaccgccttcgcgaagaaaataaacgccgaagaagtcatcctcttcgagcgctctactttcctcactgttacctccgtgacatctgaggtcggcgacctcaatcccatctacgaccgccacgagcgtctctcgaatatcatgaaggcgttcaagcactgcgctgctcgaaacacactcaccaccccggcttctgcgggcttcgtcgtcatgcacactaaaaccccccagttcaatatcttcctcggccgcttcacggataacacctatatcttcctcgttgtgcctcccggcgaggcttcgtacaactgcgccgtgctgaacaccatgcttgcccgcgagggattctcaaaggcagctgccggcagcggtggtggtgatggattccctcttcccccgccagaaacagcggaggatcatgcgacgaacgggaatgggaatcccgcgtgaaatggatggatgtgacattaggtagctaggggatggtgtcttttcccccgtgatttccgacagttttatgacaaaatacagcaggtgctgaacgatggcgttatggggattaatgtacttcttttgcattcttttcttccttttcaacccctcttgagaattgagataccctgtgggatttctttgtactgtttttcttctaaaaattcatgaaaaactacctaggtactattcttcaggctattaccaaagctcttgggttttatccaaaatacatatttcttcaagcgacattcttagcgacatggtgttagaccagtttttgatcgcagcgatcaagtctgatttccaactaaaccattctgtgacaggaatccacaccgatgcttctgcactttatctggattaccttgccgcatagcgcacagaggctgaattgctacaatgacccgacaacaagacactgaacattcatcgcatttacttcaaatacaatactggacataagatcccatccgaaccatctatattcctcgcatccgatgcagaaagcagccaaaggcagaagagagaagagtaagaacaagggagggatttgattatctatcggaccggccggcctcaacggagaaggatgggggaaaagggaggagcaaaaggataacgagaacaagaaggggatagaggagacggaggggggctgtacaaaatcaatcatgcagagagctggaacattttcattggacttccggcatgcgcatggcaatgtcgcccgactgtgtgatgtatcgcacccagggaagagaggggtattgcagctgtgggatgttattagccatgaatccgagagataaaaagagtcgagggaaattccctgctgggaaagacgtaccttcggttcggtgatcttgaggtatcgcacttggatgccactggtcgtgaaataggggatctcgaacttgacgttgatgggacgtttggctttgcctacacctccggctccgcccatgctgcctccgaagccgccggtcataccgccgccgcgctcgtcgtcgcccttgacggagggtaggcctagctctgcgcgcatgaggaattccttgccgccgccgaattgcttgatcttccagatgatggcggacttctcgggggcgtagtgcacggttccgatatttgtgcggaagcgtggggagtctgcgtcttcggggacggggacgagaatctcgacgttgttggcggtgctgcggcgtttgaattgggctttggcctattgtagaatcgaggttaggggatgacgtttgctgtgctgggtggggatattaccttgagcatatattcaattcgggatcccgagtgcgattcaaccacgcactccacccagatcaacggcttcacttgtgtgttcagtcggtagctcatgagttcgaattcaccgtccggaggaatgaaactgattgtgcggtcgttctcgaaacgtgagagtcggacacactggtggaacttcacgtcctccatctcgaccgacttgcctcgtgtagcacgacccgtggtctcgaacatggctttgtcgttcaagcccaatcgcaactctggcataccactcaggtagcacttcatcttgacagcgcccagaatctcggaccgcaggacgtttccatttgctgagacgagaagattgagggactcgaccacgtcgaggaagacttcgtttttgcggtaacgtatcccctcgctacgccaggagacagcatttgtgacagcaatcggtggccgtgcttggacatccagcttgtgtgactcttgggtgatgtatctgcccatagcgtagaacggtcagttatgctgtttcaccaccaccccgccgtaccattcagattcgactgcttactcttgtagaatcttgctctctgttgtctgcgggtatccaaaatccatcatctcatccagcaattcgtaaatgacgacgaagttatcccggatactctcctcctccagtaccttgaaatattcggtgaagacctccaccagcttgtggaggaagagtagaatttcggtggcatttgtgtttcgtttggtcaatgcaaggatatagaggttgctgtggcggatataaaggtactagacagaaacaccccagtgttagtaggtgggagcacacaaaaggagacactcaggagcgggtgtcgtatggtcggggcagcaaatgcccagactcggtggaacgcacgttgattccctcgtgagagaagcagggaggcactgctgagctttcttcttcggcgtcactgaggaggatagggaatttctcgactgcggacatgggaatatctccgcgataattgcgggccagaagggtctatagatggtcagcgggggcttgtccctgaacgcattggcaatttccccaacagggagtcgcatcgacatattttgcacaatatccagtagcctaccttgcccttgaggtcgaggaagaagagtgctgacgccatgacttgtcaatgggggtaaataggtgacgggagagttggtgatctggtctcttaaggtggggcaaaagcaaagaataacaaagacacctcatgcgcctactgcagcattgtcaatcaagtagtaagaacgaatagaatagcagttgatgaggtgagaaatgaaaggagcagatcagcggatgattgttggcgatgcccgcatgtcccaggccggagatatacgccaacctcaaagcggactagcgtataaaatcacacataaaagctggtcgcgcactttttaattttcttctttcttcaacgctcccaatagacagttcaaggcagtacaaagtccttgtgattttctacagctactccggcattctgtcggagtgctgtggtattttaattactaccttgcgatacagaggcgcggagactacgatcttaggagggttccataagagctggccgagtactttctctgttactcgggcggcgtcagaggaaccgtacatttcttacaaaacttcaattgaattatttttattataaaatcaaaaaccccttgtaaatcgtagtgaaagtccattaaaatttttgaacttgcaagttgaactctcaagtggtatttaatagctgagaaataagatgatagttataaaaagacaagtttgttaaaagtacatgtacaaatcgtagaggttccccgattgaggagttcgctccccagtcaacctaccacagatggaaatatcaaacaagtgttaacgccctgaaaatgctccaaaggagaccaataccccaagtctcagatcagacccttacgagaccgacttgagtcccaggggttcgagtatccgctcacgagccactttagtggcaacgactcctcccttctctaacgaaacagcgccgacgatagcgtacatggtatgcgcgagaacgagctcaacaccggaggcgcgaaggtcattgggctgcagtaaagacaattgttagctgagaacaagaaatagaccagagtcgaggcatacctttctgggactccatctgagaaccttctgcaactcgtacttgtttgcaagctcagcgagcttcgaccgctcggtgagaatcttcttagtctcaccagagaggttgttcaatccatccagagccgggtgtgtgaagggcacgcgaccaaactcgtccttgttctctaccggtgaggcgcctgcgtatggagcgtcctgcgccaaagccagcgacgcttgcagttgcacaatgcgttttcccaagaaggccaatcgatcgttgaatccgcggcgcccttggtcgaaacttttatgcgtcactgccaaccacttggtctcatcggagaggagtttgtcgccgccattgccgaacaatcggatgtagaatcggtctagcagtagcgggtctgcattgacatggaaggtcgggcgcttggagtcaaggtgtagactaaacggagcctttgctgctgcgggagtgtaggaccatcggggcttttcttgttgactggactcctccggggtagaggtcgcgaaggtgcgggatgggatgactccggcaattgggcgagcgacaaatttggacgcagcgcaggcggtcctggccgctcgagaagaaagattcaaagacatggggtcggtggtctgcgagtcgactcggagttggtcgaacggaaagcaaagaattcggactgggcggtgtgatactgccggtcatgtccaggtacatgtacacgagacccatgaggtctctgttaactgtcgaccacaccttgttttgtttttcatgactgtaattctcacaagtccttgctatgtagactcaggtctcttcaattgtcatctcggctgtttgacatgcagttaaacaaccttggaagccggaggcaaccggaccttcaccgctgctgcgtggtatcttttgctcgaatatgcttgacttgtgcatcggatccgaaactaatccgtactgacgctggtttcggccgtgggagcctaccgtgggagtctacacaagctagcaggctatggccgttggagctggaatgtacacaaacttccgactctgccatgcctcgatgcatgtacgatcaaaacggcatatgactcacattaaacatgcaagaaccttggaagccctgcgatatgggttatatcttagcgaccaggttatagtatctatgggatatgcttcgatatacaccataccgctgtttgcgggcccagatccagaacatatgtctgctcaatttgggcaggctccattatgatgcatgatgtgtatttgccccaattgtggattactagcagctttgactcctgtcttctgcgggctcccatcgttgaaactcgggcttcgacttggtgcgggtggtctcgcagatctccccaccactttatccagcaacatccttctctggataacatggccattatatgacccaacaggaaacttgtgctctcttaacttataggctataggtccaatagtcctgtcaggtaacatcgtccagttatatgactggctaacgtgcgatgcgagcagcggcgcaacagaccctgagcgcggcccaactatcagggccacaggtctctagccgctgcagaggaacggtgggaagttgaaaagaagaaaacagaaccgcaaagaagggtcctaggcaaccaagacccattcagcagaagcttcggtagccttctctcaacacagtcgttccgcagaagctgccgggtatgcagaggtcatagctcatagctatcgggagcacggggcaggcagtgttgttgagactgcttggttacggatatacgcagctggaaagctcggctgaggcacaagtggttggctcgaacaatccatgcctctctggactgcagaataacggccctgctgtatcagcgtaccctgagctctccccctagattaggcaagagactgtcatgtactgggggataaaacgtgacccacgtgtattggtattgagtcttgttcggccgtgctccataggtaggcttcctttttctcttgttgcctcttatggtcgttggaagcttctacggcttgcatatacattcgtctcacgactaagcaaattcgcaacccacaatgggcattgtggagacctagataaaagaactggggtatgcgaatgacagacatttgatatattcgaaagatcgtaaggttgaatgacacaagaacacaaactagatgtttgacggcctcgaattcatatgaatacctttgaaaacaacacacggctgttcaacccaaacattatttagtaaataacatcggataatcagccaacggcaaatcatctagaacaaacccagtgaaacagaattcatcaagacgctgcaagaaaccgaaagctcagaccgctggtgaaactccactgtctgcagttggtccgggggaaaaggatctatagccgcccattgcggatattatactatttgctttttcatgaatgctaatatgtctattcgagtggatcttcatctaattcccggtcgatgcttgcttccggggaaatgaaaagaaacgaaaccaaaatataatataatattcacaacagcgggtgtcaccgtactgtctaacggtttatacatcaagtcttcaggcgggcccttgcagactctaccgagatatttgatcttcacggataggagccatctccaaggtccacggatagcaacgggaatatggctatcgccaaacggcttcttgtcttgatccttgattgggatgttcgacgggatagcggtgtacgactatggatgacgcgacctattgcccccaggtaaacctgagttctcgaatcacttaaatagacgagatggacctgtccagattcctagtcttcatccttgagaacatcagagtactctgtcctgtgtcttttgcctgtctttcgttgaatatctatacttcctttctctgtcagtcctgatttgtgtgctccattctactatatccgccttcgtttcgtgtcattcggatatccaaatggctttcaacgctacttttgcccatggcttccagcccaccccttcatcgccggtccaggcatgttatacctctgtgggaaacgtcctggcttgtgatcactcggtgcaagatcctccctcaccacgacctttcccacccaatcctcctcctagtcctgcttaaatgacggttgattggggtcttctttgtttggcgttgaggcgatatagggcaataggtgagtgttctttatgcagccatgtcaaatatatagatctactaggtagatatatatcggcataggtactggaccacatgagcatctactaacttactttacagatcatactccacggcatttcaaccacggtctttacagcggggatgtgcattgaagggcgactaggatatcataatgcgatgtgtatcgttgtcaatgcaatatcagttgcaggaaaaatggccacgaggaacattggaccctgaggagaaaaaatgaaggtacaatgtgtgagactgaaccgtgagaatgaacatggatttcgagggggttatatacttgaggtgcttttctcattcgcatatccaccgggcaaaatagtaaagtctagacacaacgagggtgagcatgtaggctttcaaactccaacattaacatactgtagagttgtgcaagtagtctagcccaatccgaacgcaattccaatggaaataaaaataaacagctgaacagaagaaaaagaatcagcgccttttaagcttgcgccaattgaccagattcgtgtatatttgagaaaaagtcactttaataacacataaggaaattcggaggtatgaggtacggaaacattttaaatcaaagcaagaccaacagcactagcaatgctgaggccaaccacagtccagccagtcttgataatcacagggttggtgagaccacggccaagatcccacatcaaatggcggataccgttcatggcgtggtaggtgaaaggaagggccagggtggtcttgaggaggaccttggccgcgagaggaagagcgcccatggcagcgaccatggaggccgattcgagatgccaaccaagagcgggggaggcgaggtaagcggtagcccaaatgtacagggtgccggagagagcaacaccggtgatacggtgcagggaactgccgatccagccgatctggggcttgtagatagtgaggtgaggagcgacagggcggttaaggcgctgcttaacgaggatctggctggggtcctcggtgttcggggtcgaagtaacttgtctgtagaccagtgtatggttagtatgttcttctggcgattgtggatgacgtaggatttcgtgaggggcgctggattcgagggtgggtgaaacaattgaaactcgctgtcttaacgctgggtaactgacctcgtctgaatgttcttgccgagggcaacagcgacaggggaagcgcccatcatggacgaccgcatagcgagcggttgctggacggcaactgttcggggataagttagatcgcaaattcggacagggtaggcattggggggtaacatacgccgtcgcagcgactgctgggcaaccttctgagagaacattgtgattgcggagttgagattgttctgtttgatcaggataagaaatcccaagtggctcgcgagcgatcggaatcaacggacgacctcgggtacgggagtgtctagtcacgggactggcacccggtagtcggcgtccgccaatcagatcgtatctattaccagccggagtatcgttcttcccgacacgctactgcagtcatgtgatcacctcgcctgttttcccactttcttcggtccgcagctcccctttctttctcttcctcaagagtctccgctcacgtcgtctactggttttggctgggatgatgtcgtcgtttgctttccctcactgactgcggctttctgtcgtggacgccgagggatctcaaggctctcagaaggagagtcccgtcgttaatcgcccgttccactctaccaatgaggggaaggggtttcatatcagggatacatactgcatgtatcacattacttgatgcttgtagttttgccaggttctttggatatactacagtgattcaagtttacggcaactgctgaaatgcctgcattgggtatgatgaagcaaaatctagctgagacactcatgcttttgcgaaggtgcaatgttcgctcaagtctacagcccgcaatatataattcacaatggataaatcaaagcaatggtctttttttccctacttgtatctaaccgtgaaacactgtcagctgtaaaagtcccaggttggagatagagccattataaggtcatcggttcctatcacatgtcaagggaccacgacatgtatgtatattctttccttcacacctgggcttggtatttggtccacaggccaatgttttgatcattcacaagcagaacaaagggctcttggacatgtggcatatcttaaggtcggcctgctcagtaatccagaaattgtgccccagtgtaagagcccagatgcaacctcggcacctcggaccttccccacagcagataggtccgcggctgtaagatcggtttattatctggtctttcgtgattcaaaactatctcttgactctataccttcagaagcgaagaaagcaatcatactcgtgttagtatatctggtcccttgttcaagttccatgctcttcaagttattgactccgcaatcatcagattagataccccgactaaacaagatgcctttcaacacagccttaacgcgaaagctcggtattcgaggtgcgccacgggtacagtattctgcaaatatttccagctgctgatcatggatatagtgcccgtcgtgcagggtggtatgcaatgggttggatacgctgagctggcctcggctgttagcaacgcaggcggacttggacttgtacgtcgtatacgtttgaatgaaagccctaactacatgaaatatctaacactacaatctagctcacagccctcacccaaccaacccccgaagacctccgcaaagaaatccgcagatgccgcaccatgaccaaataccccttcggagtaaacctgaccctcctcccctccatggttccccccgactacggcgcctacgcccaagtaatcatcgacgaaggaatcaagatcgtcgagaccgccggtaacaaccccggccccgtcatcacccagctgaagaaggccggcaccatcatcctgcacaagtgcacgacaatccgccacgccaaggccgccgtcaagctcggcgtggacttcctttccattgacggcttcgagtgtgccggccacgtcggtgagcacgatatcaccaacttcatccttttgagccgtgcgcgccaggaactcggcgtgccgttcatcgcttcgggtggattcgccgatggccagggtcttgctgctgccctggcgctcggtgcggaaggtatcaacatgggtactcgctttatgagcactgttgaagcccccattcaccagaaggttaaagaggctatcgtcgcggcacaggagactgataccgcgcttgtgctgcgtcggtggaagaatacctcccgcctgttcgctaataaggtggctaaggatgcattgaaggtcgagcaggagagtaagactggcgaatttagcgaggttgggccctatgttagcggcaagcggggtcgtcaggtcttcattaacggtgatgttgatttcggcgtaagctacttgcataattatgtatgtcttgtgtttgctgactctttttgtcatacaggtgtggactgccggtcaggttattggcttgattcacgacatcccgacttgtgaggtcctgctcacccggatcgagaaggaggccctggaggcgatgagccggaccaggtctttgtttagcgatgctccctccagtaagctttgaagggggttttatgttacagatgtggtttcagtccgtgtatttagcttcctattgtttggaaagatccaatagaatcacttagttgggatatttctgacctggctttgtacatttgcatgttgaataatattatcttctcttcacgtgaatcgttcacgtcatttccggtgctaaaataagagccaccacacaaggggctggtcaacggtcaataataagcattcccgagcgagggtccgtgatattgtatcaaggatcaacacggaacatgcagatcctcggatactcgggcattccttcgactccaacctccaacaacaacgactcgaacgcaatgacggagtccttttccaagctgaactcaccccggtaactgcaataaaaaaaatgaatgaatgacatttgctctccgaaccctccagggctgggtcccctcatacaaggacaagaagagtggagacatccttgcatgaagtcgatactctggggaattcttggagaagctacatttccagcccggatgattggctctgtctcagttgtagctttggtttcttgagtgtgcttcctgctgtcgcggcctttgtgtatgatatcattcaccatgattggtctctcccccggcaacccttaccactcacatataccatcacgcttggtatgctttcacttccacttccacttatactatttagatggtgaggggtagaaggtctcgaggtaaaaggtagatctgacccaggctagcatacgcaatccaacttctcgagcaaatagacgatatcccattgcgttgcacagtaatacagcccagcattaccccgtgaagatctagataacgacatacctcgtccaacgtgtctccagcccagaactgaactcgaatttggtttctctctatccctcccgcaagttagctactcaatttatataccacgaatcgcctctctaccagctgttccaagctccatcaacatcaaaacaaaaccccaaccccatatctatcaatacccaccacctcaaactcaaccccagaaggccaactaccaaaatccaaaatgggcatcatatccaccctgacacgctgcatgcgaaaagcccgcctgtccaaaagactctcaacaacaagcaccaaactccacgacgaagactcaaacgatctaatcaaaacaacctccgaaacagcctctctgacccgcacaagcatggactccacctcaacaatggtgcaccattcggtccacgaaccagttctgccgtgcgagtcgcctgcgaaccgtatgcagatcgggacagataatgggaatatgcggacgttgttcgatgacgatagtactgccaaccagatggatcgtccgattttgaaattggattgtcggtcgcctgttgatgcgccgaggaaggtacttcaggggcctctggaagtggggaggaatggaagtctgaataaagctactgagaacaaggctgcatgggacagacctacagagggtgctggtggttatacgggaaaggatacttcgggttgttcgtctgcgacaacggcccagaatggctttgaacgtgagaaaggtgtgtctgagaaaagggataagaggtctatgtcggctttgttaaagaggcattgtgggctgaatatcccacgttcgtcgatttcgattaagacgtcgcgcagtgtgcagtcgccgagggggttggactctgctgggtttacggaggaggaggggttggtggataagagggatgagaagtgggtggatgtgagtttgaatgagaagaagaggaatagtgtatggggtggtgttgggcttgggagattgtggtagaagtttgttggggtgtcagtttgtatgtaaatagttcgcgttgtagttggaatgaaggcaaagttgaagatttacgtttctttgctaaacaatgactggtagaagcttgtgcccacgggggaagtggataagagcgaaggcagacacaaaagaaaaaaagtcgtggagtaggacgagggaagggtgaaggttgagaatgggtcactaaaggggcaggaatgcactgcaagggatgtcggactacaagggacaaaatgggcaaaatgatgaagtaggattgcactcgaagaagttctactggttcagaggaatgatgataatgcaagcaaatctaatgaattaaagtaatatatgcgaaagaaaccctaaccaagacagcagctgggggattccaatgcacaaagcaacaagcacacacaccacaaggtgataagcagaaagcaaaacattcttctttctccgagggtgccacacgacacaagttaaatgatacacgagatgcgaaatgaacaggacaatctaactaatcaaacaaaagccaaaagcctgcttcccattcccgaaatcgttaacagtccacatcgccagccatgtcgaactcggcaccaaggtccgaagacccggcatggtgaccggtgcttcttgcatgatgcgagaaaacaaagcgaagcgcttagaggatggagccaagggcaatgcaagggagaccgacaccgatgaggtcggagttctgcgagatatgttagtgatgatcgagaaacagagctagtgggagtactcacggcgctggaaggagagttctggcagcaggcaatgttctgcttgcacttctggttgacgaggtcctggagagggataccaatgatggggatctggaggtcgagcttggagcactggtcgaagagaccaaggccgttggcaccggagccagagccgatcaggttgctgagggcaccgccgagcatgccggagttgatgtcggtggtgtcaccggcgtaggtggccttgttgcagcaagaaagctgggcctggtcaccgcacttggcctgagcctgcttgacggtcatgttgtcggggacagcgaagcgaacgtcggtgttacccttgttgccgacaccgttgccgttgccagcgccaccggcgttggggccaccagggggaagagcgtaagcggtggcagcgaggccgaggacaatagcggagagagagaactgcattgtgacggtgggtttggaattgaacgagagaagactcggagagtagagaagattgaagaatagagaaggaaagcttgaaagagagtgatgcggatgaagagaaaactaacagagggcgatgaatggcctcgtctttatagatttgactggcggtctgtgagtctccctgactgcatattccagggccaagttgtttttgctacctaccaagatcatctccagtatgttttcggaatgtaactgggaaggaaagggagatgaagatcgctccactatgcagggcctgtagaccaacgagggtgcacctgtggaggttcctggtatggatctacttcccaggctctcacttcatgtgactagggagagccctggcattccctcgccctggctcatcagccctcagtccgagtgtccacaatttgtctgtaacgttagatgaaaacaggtgtaattcagctatgatatactcaatgttgatcttttttgaacagaccatattaacccatcaaaaccaaatcaaagtaagcttaagctcttccaagtgggtctacgttgtaagggcatacctctctacttcaacttcccacaggggcttttctccctttagactttgtctctacacttcgggagctaaggcatgccacgcatacactcatggcaatcgtctgactctgctgaggaggctgggattctccctctgagtggtcgaatctcccaatctcccatatgagggtcacctgcaagggcgcctactgcacctcggacactaaagctacgtagggagatctaagacactcccttcattgtttaatttgtttaatcttaacctgcgaggaattagggcgccgggacggtgagcacagggtagtatccccgtgaagtctccgattgggcgtattgccttccgatcataatctcgtcgattactaccaagcttcccccctggcggcttctcacaggacctgaatcagtcccctttttatggtctggggttatcaatagtgtccccttcaatcaatctatagcaatgtttccccttggtctatacgtagtccgcattactagtgtactttggctttcaaatgtcgtctcgtatcgcatttttgggtcaagcttttggcaatattgagaatgatcgagatcctgctagactcattctaatgtatatcgcaattttatcgctaggagttttatcgactatagacacacttgaggatgatatgagaatgtagaaaatgacgctttgatgtcctttgcggtgcccaataggcatgatatagtacctcattctagttgaatgtctgttaaacagtagtctagcagttgaatctagaagataattcccagagtagggaaactccagaagtagtgggcttactgtccaccacaacgctggttgatggtggaccggcagttctagtagtcttcatgaaatcaatataccaaatcctcatatttcgatgctgaatatatttctactttccaataaatgcttcgtttcttttaatttacccaattaaagtggtatggattctctatttggacgtagaggttttaaatatatatcctgaggggttaaggagagtatgacagttccagatatatatccataacacaacaggtacatttagttcaacgcataacaataaagatatgttgcaattctttaacaagtccaatcttactattcacgaaatttgaatatttagtacacaccacttggtaaacccgtatacctgatagtccatgttcgtgcaaaccaacccgtcaaaacattgctctcctgacgccttccacgtttaattaatctggaaagtatttccaccggtgccattaaccttactttccaaggtcgggattgatccaatcgatcctttcagttttgatgaggagccgcggtctccaaatcgccaaggtaccccaagaagcacgtcttcgaacgcggctactctattctagggatgtacggagtactagacacaagagctagggtgcccgcaagctatatctttgtaaaacatctacttatccgacaaatctgtgcggctatcttgattcaagcaataaatagtcctcgtgagataccaagggaacagatctgaaggcgcatctctcgagaaattctccaatcccgaaaggaatcgtctcacaacgtcttcgagggcatagggacattcctatatgactggacacgagaagccagcaagagatttctcatctgggaaattgaaatatcgaccgcctaagttttcattcgtgttgaactcctttgtcgggtcccccttgttcaacgtaccacgtggagtcttccttcacaaccccggttctgtaaaggctgagcaagttctggtcgacattggaatctatagcagctctatgcgctattatgtgaccaacttcctaaactaatagagaagcaagcggaaggatatctcgattgactcgctcgcttcggtgagctcccttgcataactcttttcgtttcaccctttcacactctgagtctagagtgcggaagcctgtctaaactcgggtttgaagaattaattacaaggaaagctcagaaagcgtagagaagagacggcgaaagtcgaaataaaagatatgtgcgagactgatcttttggatgagaaagactatgggcaggatgtagtcagtcataggaacattagaagttatttgttgtccggtaagatgcaaatctgcagggatggtatacaactatgcaaagggagttaatttaaatatgtgaaattaaatagcccgatttgcttccaatgtcacgtcaaagtcagtcttcgagaataacagatcatgtatatagttactctaattattcccagaaagtaaacattaatcagaccgagctatggtgcgcattggcttgcaatcaatacatgcaacggaacaaatagtggtcgtagtgaagggaagttcgtcttctcaggatttggacaagaagattactagaataaaagcgccaaaaggacaataccaaaagcccagaaattacacagaggtagtttcgacccaacattgccgtaaataacagtttcagttggcttggatgctgtgggcttggagatagtcgtcttgggagcagtcggtgtgatattagatgtggtgtgggttttgcagctagttgtcatcttggaggacgacgcgtgcgcatggtggccggtcttagaaggaggactggcagtagtaacgactaccagatccacagaggttgtagaggaacaagtgaccgtgctgaacccaacgagcggaactgttgccgtatgagaggcccagctgatggtggtacaaggagcctgggggacggacgtggctacaccaacagtctcaacgaatgtacgcgtattgctggtgatttgaggaacagctgtggtcttaggagcggggtccgaagtagtgcaggttgtagcgatatctacaatagcagggttctccggcacgaagggggcgcagataccagcgaagaaagcaagggcggaatcttcctccttcttggaggtgctccaggcccgaatgcatccgctaactttgtccgtgaactcagtggatggacagaagcatgaggcgtcgctgttggagttgcactttggaatggagagccatgtgttgagacatttgggtaccacgttggggcagggcgcagtaatagcaggtgggctgggcacggtggcggttgtggtgctgatggagctcgtgaccgggggatgcgaatgctcaatacgagatgatgttgtgctaggttccgtttccacaggcttagaaggacagattgtggttgacaacggatatgttgaggtaacgaatacagtcgaatgaccagggcagttagtgactgtcggtgcacatttggtgatggtgatctcctcagtagtccagactgtggaagtcgtcacccgctgggaagagtggctagtagtcgggggatccgaatgaccgtgaggagatgttgtgctaggtttagtttccacgggagtggacgggcagactgtggttgacaatggatacgtagaggtaaccaaaacagtcgaatgaccagggcagttagtgactgtcggtgcacatttggtgacagtgatctcctcggtagtccagaccgtggacgtcgtcatgtgctgggtagagtggctagtcgtagaaacctcctgcgatgtccaatggaaaggaggcagggaggtagttgaggtcggactgggctcagtgtgagagtgggaagggacaaggacagtgtgacctggcggcttggttccagtggaacagtcaaagtcgatctgatggatctctagatcacaatcgccgaacttgctcttttcggggagcgtgaactcaactgagacagcaccgccacactggtcgttggcgacatcagttcccctgtaccagctcgaagtgacatgatgacaggaagaaccatcgggcatcttgtagatgatgaagacatcagtgtcccgggaagttgaaagatggaagtttcggatcgagaatggagcatcagcggcggaaatcttgattgtccagttattgtcacgagagagctttcccccaagacaagtgcccttcaacgagttagaatcgagagccttttagaagtgcaactgtcaatgacataccccgtaactagatccctgacagccattcttgggctcgagcccaacgaagtggaagccctcaaagctccaattgtcaccatttccgagctcagacaagtcaaagcctttccgctgaacgtccgagcactgattgtcggtattgtctggactggtgtagcagacgtcggtaccccaccactaagaaatccccaagtcaggccagtgtggttcgggttgcagaatggatgtactcacaaggcctgctggatgagctagcgcagcaccaaaaagcgcaagaagagcaattcccttcataatgggcaaagctgtcttagttgaagccagcaattaaatatgatattaaatgagcgaatgacgcttgtgctaagcgtgggtctaaaaaagaacgaaaatgagagacgatattggcgaagtttgtcgactgggtgttggatggcgagcatcaaacagagccaggacatggtcccttttaacttcgaacatgtacagatgaaatattccctgctcaagttgtgatatcaacagacctgaaagtagaaaagaatgtcagccacttggatacaggaattcgcgattaatccaatggtgggagcccaaaaccatcgtgaagcagtcgacttaactgaagtcaggcaattcacatcgttgtagttcaagggatcggcgcagggggaacattccagaggtatcaaccccgaaagaccaattagaacagtcggtaactgtacccgagctatagggctcgctcggaatacctcaaaggttcaaagggttggcaaatcaagcaaggagctacatctggctgcttagaaagatatactcaggttagaacaatagttccctatagtgtatcgctcgggagacttccctgattttcaaatgggttaaatggcactacgaaagatttcataataacccatgatgtatcagtatctatgcttggatactaaacatacccatagtatgtggatatatagatcgcacgcgcgggttaagctgaacgtttccacctttgcttcggagttcctatgtatgaagaatttcttagcttccaatcgttggtctatcgtactaccaaagcctgtatctctcgtttgttgcattggtcttcacgaggcgttaaaacatgtggaagagatctagaatcggaagagccgactacatacattcctgctcgcgcattccaccagacagttgcctaacaagttaccattgatccaattcccatgttaattgtaccacgtcaaataaaccgagaccaaagttcaacacagaagctcgttgttgactacgcaggaagctccatagagaactcatgaggaggggagagaaggggacgcaccgtagcatgttcatcttcgtgagaataagctgctgagatactgatctgggcgcataactggaacttagtctaaagatacaacaggatcataatggtgaacaggtcaacgtaaccaatgctaaaaaaaggtcttccacgaagtgctagataggaaggtgttgaagactgaaaatgtcgaggtgatcttgaggctaggtggttttggggctacatgctaccagagagatggtgatgaatctatggaaggaggctgagcctctgggaatgacaaacgagacaaacgagacaaactaagcaaatgctcaggtgtaaaatggatgtatactcttgcgctaactctaaatgggttagcgcaagacctgctttatttaggtaggcggtgaagttaaaatgccccgcacggaccctctgtttcgactgggtagatcgcatcctccgatctctttctcttttgttatatcaccttctacaggaatcattgctttcattgcccagtatgtctgcctcacccgaagcatcggcatctgctccagcagagcgcgccagcgcctcaccaatccctgcttcgtcgggccttgatacggaagccaagagtgatatcgacagccagaaagaccaggtggaaaataacgaagagccccaaccgactgaagaaccggagacccattcatccaagtcgcaagccgatgaacctgagcaagatgaagagacatctgcaccaccactccccgatgaagtcccaccgccacttcccgccgaggctccgcctgcaaaggtcgaggacgatggatgggaacctgcatgggacgccaccgcaggggcatattacttttacaaccgcttcactggagtttcacagtgggaaaacccccgcgtgccgcaggccccagcagtcccagcagcaccgggcacagaagacagcacccaaagcgcagttcccaaaaaagcgccagtacttggtggctacaatccggcgattcatggagattatgaccccactgcaccgtatgcgcaataccacgaagagccagaacagcccgcgaacgcagccgttttcgacccctccgcagcatatgcagctaccggcacatttaatcgtttcactggacgatggcaagctgcaacaattactccggaaaaccacaacgatgagaacaagtctcgacgacagatgaatgctttcttcgacgttgatgccgcggcaaacagccatgacggccggagcttgcgcgcagagcgcagtgctaggaagttgacaaagcaagagttgaagcagttcaaggagaagcgtcgcgagaagaaagaggagaaacggcgggcttggctcagggattaggggtctgtggctatttgtttgagttctggagggagggggggttgtttgatgtattctctcgttcccacgggtcgcattgccatttcggagctttttgataccatcccactggatgtgggactcggcgtttgagcttatttgattgtttttctcggcgttctgccttgcatgtggatagaggcagactccctgtcttctctatccacgattgagcaaaattattgtacaatgtagcaatgtatcatcacaggtattgtctcaaaatgagaccatcttagtaatttgaatccatacatctgcccgtagtgattagcaccgacgttcacttgacgacttgtatttgtaccgttccaagactgatagcccactatcagtcacatgacccgcgatatcaaattattttttgctgcgatcgcttcatttgctgccgggatactctacgctaggaagcaaagaactgaaagtaaaggtatgaatgaacttacttcctgttaattgattccaaatttgtggaaaaacatctggaacaccgattcccattttgtggctggaccttgttccttgacgttgaaacgcttatcaacgacataattgcatgaatatatcgcgagagatgctgtcgaactatgcaaaaaccccaatttctccagtcctttgtgattttacacctatcatatccttttttttcttattactcgtcttgtcatcttgcaatcctgaataccgacctattactgacaccccactccagcttaataaataaagtgggatatcaaaaccaaccccaccaaaagaagacaaaaataatatcaaaccctggtgaccatacatcatgtccgcttccacgacatcacaggcaaagccttcagtgccaatcgcactctctgctgatgcagtcgacgatctgatctatgacgcccgagcaggcgacctcgaggccctaaacgaggacatcgccaacctggccagccaacacaactgcaacgagtcccagatcgtggcatctgccattgacatggcagatgaaagcgaaggcggctcgggatcctgtgttctgcacttccccgccgcgaatggaaactccggtatgtcaagaaagatttgacatgacttggttgtttttctacatttcatgtcatgtcaaatatttctgtttttcctctttatttatctttatccccacctctttattgtgtgcattactaacaccgcccagaaatcctcaaaactctcctccaaaagctgtcgtccgcagacgctgcccagcgcgtcgcgttcgtcaaccaccgcaacaactccggcaacacgcccttgcactgggctgcgcttaacgcgcacctggaatgcgtcaaggcgcttgtcgaagctggtgcagaccttgaggttaagaacgatgctggccacgatgccgtcttcctggctgagcggacggcgtggactgctggccagggtgacgatgctgagggtgctcagggggatgacgctcagacccaggagattgagatgactattggtgagaatgagggtgaggataagcctgctgagagtgctggtgagatgtctgcgggcagacaggttgttgagtggctcctggcttcggataacgccgctagtttggagaagggggctactgagggtgaggctagtggatctgcttgatttataccgagatgggatgacagcgcttttttgcagaaaggattgaagaaaagtttaagatttcacgcatagaattggaaatacgggtactttcttttcttgcatatgttgtttgttagtgtctatattaatgcatttgattctattcatcctaagattacattggaagaccccgcaggccccggaatgctgctctagtacatatacataatgttcgtatgttctcatctacacatcaattcaatcactgcggaccttgcccgctaccgctccggtagaagacgaaacctccacaggtggtggagtagaagggccgatctcccgaactttcgcatcgaagccgaccttaaagcgccggtcccgccagacgacagtcacaccgccatacaccgccatgatccagatgggcagggccagcagttcgcggcccagccaggcggcaaaccactgcatgaacgggcgacgggtagcctgggatgatcggtagcgttggggccgagcaaaagccggagtatcctcgtccaattcgacgcattttccggaatgcagcttgatatacagtgtccaatcgaccaggatccagaacaccatgccaagtgcgaacaagccaaagaatgcaccccacgttccaaggtgggaggcaaattgcatgccattccgctcgagatacggcgccagagcagtggtaatgccccaggcaccatagagtgtgcataggaatgactcggtgcctggttcgacaagtgtagcgagtagaacggtaaatttgcggactcgcagccatcggatacgacgggcaatgtaggccggcacgctcatgttggcgacaggctggatagccatgtcaccaaagaccatggcgtgcttgccccaacgctcgcggagctctttctcttcccgcacctgcttcttccacagcagatcaccgatcagatggtcctcgcagatgttgtcggagaagaaatcgatgccgggattgcgagtctgcggttcagaggccgacggacgggtgagatagtcaagatgggagcggcggaacatgttggattttcccacgatgcacggcgcaacgagaaccgtgttgatcgcggtgtacattttggcgtgcgcggaggacaggaacagctcttccaagcgaccgcctccagtcgcgatcatggctgcaggcccatcctccggacggacggatggcatcgctgcagccgctgcattagcacccgtgccttccgggttggcatctaggagcgcctgccgctcttcacgaaggttgctatctccggtcacatccactgccacaggcagatggtgcacgaacttgtatttcttgctcgatgagggtccagtcccgcacagcctgtccaccatccgggcacagactccctttccgacccagacattgcagtcaatgatccagacaatatctcctttcgcttcacggtatgcgcggctcatattccggatcttgggattcggtccgagcgtgtacgtattgttgccatcttgctgcaagagcggatcttcctgttcgacgaaaatgcacgcgtcgacatgggggaaatcggtgattagtttgcaaagggtagagtaggccggatcggcgcgcgtcgctacacagagccgaatgctgagcttgtcgggtgggtagtcctgtcgaaaggtggcagcgaggcagtcatagaggtgcggctcgaggcccttgacaggccggatggcggtgacgtgcggtacgtcggagacggaggctttcgttagccgtgaccgatgtggcttgctgaggaaatatttccatctgagcagaaggaattgaattagcggtatgccattttgagaaagtaggccgaatcatacatctgaaaatatcccaggccacaaactcccagtatgaatgtataccagatcagggcaatccaaccgatcgcgacggacacgtatagcgagccatcgtcagacctgcgaaggaggaacgaaaaggtaggctttagcatgggacacaaaggaaaagcaacatagaagcagatgagaatgacattctgagggagaaggagaagcagcaattggatgtgggtggatttcatttcggcagttggctgtctccgccctcacaagctacaagacttgcattggaccaaccagagggcatctcttttccgacactataaataatgcgatgtatcgaagtagctgcctactcggaacctccggatgtaaaggaaagtacttatgtagttcaattgtagtaattatggctatttgtttattgtcgaatgaaggaaaatgatcaatatggcccccaaactccacctctcccatatacctaaagcaaatgcaaaccgccgttaatcacgttttcttcttcttccggaccaagctcgcattgagcacattgactcctgccggctctgacggagctggttgcgcgtctcccgatccactcggtgcttgggtttcattcgcaacaggcgtgccctcacccaatgacttcttccgcttgcggatcagcccgaggtcaaggacattgttggtattggtatcggcaggctgggaagcagtgctgcttgtggtattgctgccgacaaccttcttgccccatgtaagctcatccgcgagtgaagaaactaggtcaacgtagagcttggtactggcaacaacttctttctcgtcatagaaatgatctaaaactgaatccatcatctttttgtagtctgcttcactgagaacgacctgtccgcgtccggcctctggccagtcgaaagggttgactgtactagatctaccatccaggggaagcttaggagaggtatcggcggtcgtggaaattgttgttgccttcgtcaaggtggcattttctttggtctggctagagccattctccactttctgctcgttcggaatggccgcagaaacctctactcccttcgaggccaggccgttgtcagaggagccgcgtgtttggctttccattgacgttgagttcatcagaccaggagggttgatgaccaaccacagaaagccgactaaccgaccagcagagcattcctggcggaaggacatcatctcccagaattggtccaaggaccgtacgctgcgccagcgtccggcattaggagcgtcaggctgggcttcattctcctcgggaagttcaccgtctaggtcgatgagaaaacgagtcttgggatcatcggggaaacgaggcactaaacagcggggaggagccgagggatcgtggtacaattgcttcagtgggtagctgctgagccaccgtgggcgatcctgcgcgtcggtcttggccgtaggcgggaagaaattgcgtgtttcaaagcggtcgcagcttggaacaatcaagtatgcggtggcagaggccttggcagcttcaactgtttgatccagcgctttcgtctcctgaagagcagactctggctcatgctcgcgtaaaatcgggtctagaacacggcaccaccattttattagacctcggtcgtccagaacgtgtttttcggcgttctcaatgctacccgggaacaggtactgattctgggcgcgggcgaacagcgacacgaccagacgtacaccgggccgttggcgagttcgagccagaaatgagagaaatgtattggataccagtctcaggacagataccctgcgtggcagttttaggagatgcaggagtccagttgagtcggccttggagacgaagatggttgtcaagtgggccgcgttgtagactagtacctccattccgaagataattgtctcaccatcatcgttgcggtcaattgacacggagaggaaatgattttcgcagaatgtcggttcggagacctggcccggcgcagctgcaaagagagcctcgcacggagtgggtgttgaggagacatggcgaacggtgatctcaaccccggtggggaggaccttggccaagagatctgccagatctgcctccattctcgttcgtccaatgagagtcgtggaaaaggtgaagagaggagctggagatcgcggtgctcgatttcgcgccctcggagatcacgtgccaggaacatatactgccgtttcaggaaggtcgatctgtaagacattcagaaagtctttgggcgggttaattaagtaggtggtagtgaagcagtgaaaggtgtcagcaacgggattagtccaaatacttcaaaggatatgtagaactacctgaatgaaagaagatgggaaaggcttattcatagagaccgcgctgcctagcatgtttgctcgatactaacgttagccacctgatatgtgatatttcgaagtgttggacctctgtcatcccaccacttccctcagattctccggttttcccactctcaaacaccaacccatcactcaacccagactctgctactagtggatagcagaacaaaagataccaccaaggtaagtaggctaatcagattgatatttcattgagcagactaattgtactaacatttcatcaaacatggaaagcacagcttcaagtgtaacagagccgcatcctggtcacgccgatcaagatgtctcacagaacctccggagacctcataggtaagactgaatttgtgttaactctgtgcagaaacgccactgaccctgcacctcagtgcccgacctcaacaaccaggaggtctgcatccagttgcagatccgttacacctgtggtcactcagcaggaggcgagttcatcaagtgtcaacgacacatgaaaaaggaggatgaacgctgcattggtcgccaaatcaagcacatcgatgtcaagaactcgccacacaagtgtcgcgtatgtctgcgaagcgaatgagacacggtatggtatctattcggcaggagctgacagaaggatttaccttgggagtctggggaagggcgaagacggcgcattaagacacatacgattatcacgacagagaagccggtgctttctatctttgttctatctttgaatcaaggaagttcctggaaggaattcaaccagggttattaacttacatcccagtaaaaagccacgggggaataaatgtaatcgaatgcataagtgactgtatgatattgatatcatttcccgggcttgatgttgcttaaaagtaagacgccacagcatccagatcatccacattgagcagaatgaccccttccctcaaaagagccctccagacaaggtttcgtgtacgaactgggaagtacggcgtgttccaatatctagcaccaatcccgcgctcatttgcagtggcaatctgggctcggagagcttttacttggtcgtctgagaggatcgggtccgtatcgacagttatcttgccgacggcttcctggaaatccgttgaagcaataggcgagacagtgctagtcacaccagcgtatttgggatcactgagatccgcgagaggcgcatcgaaaaagtagtctcggtctttgacgggcgcaaccatgtcgaacggtgtctcgcccgtgccgatgacagtgacgggtccattggtaacgttgttgccatccttgacggtagtaagatatcccttctctcgtagaggttctagagcatcaatcacagcctcgaacgtctccgggccggatgtcttcacatcaatgaagaagtaaagcgtttggtccggaacagtatcccacacgccactatttcgacaaagcattagcagtgagaccgtgttgggcctcgaccagatactgactttttagtgggcgatgaaataaatgcactatcgggattctgacgctctaggacatccagaatgggattgatatacaaggattcgagagttcgtgactccgtcagggcggattcatcgtgaccaaccttgtatagttagtatgctacccacaagaacgtgcaagatatgacaggttaatcaaacacacataaagggtgccgttgtatagccagacatcagcttcggtagacatgcagccatgcgagagacctgagcatggtcatgtcaggggaagtagacactagacactagagctccgacataccggtatagaaaggcttgtcacgccaatagtcactgggaagatcagtatataatcaataggagtgagatgggaattatccgtacttgtgagaatgaacaggaatctaaacattcgtggcccttagaattaacaacattgtccagatggcgaggagcttcacagtgtccatcgatgtacggagtataatatcatgcatagaactcacaggtaagagatctcttgtcagatcagtgggataaccatattctttgctgccgtgggtgtttttcaagatgctctgtagggtagaggggatcgccgcaacggctggatccggacccgcgacgagagccacaacaatggcagagaggaacaacatgaaggcagagagcattacctgatgaagttactcaaagaattggccctcgtttatatatcggggaattgaaagaaggtggaattcaattgaattgaagagggaaattgcactgacgatcggcagattcacgcacgtgtttccccaaggcgttctaaggggtcagtaatcaccataacgccaggggggaaaaatatacgagtgcaatatataagaaacaaagttgatcatttaatcttgcctactagaaacaaaacagcactcaagcaaggtgcaagaccaattaagagctgatcgtacttattgtttattagacagactacaagaaacagaggataataatgtatggtatttggcatcaatgccagaaggtgctaaaagaacatgaaaatcgccagactaacatagtcatcaagggagctcgaggaccgacgacggcaagattgtccaagaagaggccagttgtgaaatgaaatctatgtacgtcacgataatatgaccttaaacctcccgcacgcttggcgaagaggcagcaccggagtcttgtgagttccgaccccgaagactgaggtttccgatgcgctggactaagttgctgcccacagcatcaaccgcacccttgggcgcaagcaaggtcgggccttgagcagcagcttcttggactctgaagagtttgatagctgtaccgttccagacaccaacagttcctggagttgcaccagaagcggaaccgactaccatctcgctggagaagatgaaaccccacagcagcgattcgtaccagcccatggaaagtgcagaccactcgaaggattgcacgcgaaccggggtgggctcggagattatacttttaacctcgggctcgtcagcaaatgatgggagattgtggactagtgttcgggcctccgggctggcagcgcttgcaagcgctgcaccaggtatatgaggtgcaattgctgagatgatggtgagagttgtgtgtaaaggaagctcgggcaaccatgactcgagctgggaaatattgttagtagcgaacatttaatggaaaggtggtttggtctgcaacgaaacttacccatgggacggttggagtgaagccactagcagagggggtgaataaagcagacatgctcgtctgactggtcatgctgttttgtcgggagaaaggtggatgtccagcgggtttctttccccgcgccttttcggacattgctcgcacctgctgcactccgttctcgtccatggtggatgtcgtggagggcctccgtgaggtttgagctgagaatgatgactgagatggcgtctgtgttccctcttcctcacgttcatcatcggagtcgtcatcgccaattgcaaatggactgttctcttcggggattcgagtcaatggtgaccgggcacccgaaggagtgtgcagatcatcctctgactgtgaaagtgtagggctggtggcgacatctgaagaactgccagctttcctcctctcattctgccgttcgatctcttgctgaccactctcgagagtgaaggcccgcacagcttcaaagcgttgcctatatttcagtatcgagtagacgagatatgggttgtctatatcaagtcagaaacggctgggcggaaagttaagatccgggtagggagtttaccagtgaacttgtgctcgagcataatgttgatgaagtcaagcaatgatgcaagaagagtatggttggattcgttcgccaacaagaaactgggcgaagacatagaagtaaaaagttggatcaccttcgagcaggcacttggagaaatgcgttcgatatagggagcaatgttgttgaggatgatcaaaagcgcaggatacacagtatcgagattccccttgctagttgtcatcaacgtgtgaattgactgcggtggttagtatggaattatgccctcagatgggggcaaaagacaaaccgtgatcaaatagtcgccataagacccacggaacttgggtagccgaatcgattgtggtaaggtctcttgagcttcgaagctgttgtttaggctcttggcaaatgttggctccgcactcattgtctgaaggatgaaaacgcacatccggacgactccttgtttggaagcatccattctatactccattgcatagaagatacatagcacaaggaagtcgtgagagcgattagagtcgatgataaatgaccggaaccttttgttgcattgcaaggtctcccagaaaaggaccaacatctcaggggcccatttcaccgatctttgactcccagggagataagaagcagtagcttgcatctggtttagtcaattagccgaatatcttaatatatcatttagcagacaatacttaccggctgattcaggattctcgtcatcccatccaccaggaattggaagtcttgaggtctgtgtagcctgccaaagtagtggcgataataattcttcggtggagatccacgaccgtcttctggaatgggatacatcaagaggacaaggagaagttgcacgcaatagatcaccaatatctgcttgggatctttccaaacaacatggtcgtatgggactctccaagacgcagggttatacttcattgcctgctttgaattagcatggctcccaccgcctagtaagtataacgtactgtattgagaagagagcaaaggagagtcaagacagcctgcttatcttgacacgtcgtaatgtaagtaattgccttgacgccttggacgggcaatgtatctataccagtcagtaattgttggaataccttcataggactcgagactcactagacggcaaatacatggcctttccagtcagagtaagcataagacgtagaatctcgcatcggttgctctcgaatgttttgttggaccccatagctgtgttgcagccaacaccactctgccaaattgaaaaagagaccttgctcttcactgttggaagtcgagggattgtgaagtcggcaaagaagagcaggtccaccagtgtatctatcaactcctcggcaagaggcttcacatcttcgtaatcctctgcgcgcggtgacgtcgcctcttggttatcctccggctgtgcttcatcaaagaggacctccccagcaatttgggactgcctggttcttctctttcgacgggcccagaagaaattatcctcccattgctccagatgttccgcctcgtaaacatatggaaggaggcgggtgaggatccgaatgcaattgaggacatcacgctcgggggccagatcggggtcgggaaacgagggatgatttttcaataccgttagtcgcgacgtgactgcgagtaggagtgtttggaagttgtgcaaggcatgatctcgcgtgcgtcgtatgtcggccggtgtgaaaaggctaaagacatcttcggttgattcaggaagctcccagaactgccagcatggttagattccgagtctattggacaaatagtcattttgtatcagaacgtactctggtccagtacgggtcgtctgcggggatctcctgttcctccgagagccggaagatgccctgtttgaagacaagcttggactccgaagctcccatagcggaaggaagctggtaatcacgccgttgtgggcttcatgcagattttcacagcaaacgtcaatgtgttggtgaggtgagggcgctttctgcctgattatttgctgagtgctagaagtggttggtggtcctaattgtccgggcgcgggatcttggcttgaacacggggtatggcagatcggccgattgccaccagtacgacttacagggactactccgtatacatgtgagatgagatcgaatggtagctagtctcgtatatatcccttgtctaactttttaccatttagtcgcatgcatcaaaagacacttttagcatccatacctactacgtaggtcggaaaagatatccaggagcgctccaatttttataaacacaaatatgtctaatgagaccagcgtctaataataaaccttgaattggtatccctgtaatacattgtgaatgaatgaaccgctatgacattaaacaccaaaaccatgaatgacccaagcgcctgctcgcgagactgcagaatgctgcaaaagaattcagggagctcctccactggcagaaagccgccggctcctctcatatagccacttgttcttgactcctaggcttccacgttttcccacaagcggagaaggcgtacttggggccatgctcatggttgactccccaaaggagttacttcgagccagaggggatgcggatccaaagctctggcgctgaacagactccctgcccccgtttgacactgctttgtaaagcaaaggactggaggcaggtgagaagggtgtactgatagaagagcgtcgctcagaaaagcttgcatttgcggacataggggaggactgtctgcttgcaggactggccttgcgtgatgtggaaagccgatatctgggtggggtaacgaatgttgtcccaggagttgctggtggtgtgacagcaggatccaagccaaggagtgagcgttgggtgggggtaaggggaatgtcggagaggtcgtcctttggccggaagaggggatagagcgccactagaatgttgaaaacaaagaagagttggagaatgaacaacggaacttcttgatacatatggttggtatcaaagatttggcgtgagcttaaatggggctgttagcacgcgacgcgacgcacccgagttcttatcgcactcactaggttttgagagtagatccaaacgaccagctcagtatcaaagctgcaccgttccaaaccagcttcttcacatttttctgatcaaatgtagctgcattttggcgccggacgatctcatccagctgagggtgtcgccatttcccaggggtcagggtaccctctggggtgggaggagccagcggaggagtcgctttcggggtggaagggagagattgagtcgccattgctaaagcggtgaagatgtgatgttgtcgagaatggatgttgagatgggattgactcgagactgcaatcgtgaagtcagccaccgatttgtatatgctcaggctgctttttttttcccgagatctttttgacaacagggaatggacttgctggtattatgacttgttcagtacttacctggaggaaacaaacacaaggagctgtaagttagtaaatgcacatagctacctaggtatgaacaactgttctttctggaattcgttagtattgttgttggctatacgttgacgatcctcaagtggctgcgctcgaggaaggggctgcgcgggcataagttgacccggccaagctgacacaccccttatcgccgtgccccctcaacgtcatagtcgctgattgttgacacttcttcatccccagattgaccaactaaaatggctgccgatacttcacttgtggagaagcttgatgctttggtggctgacgttcttgccgactggaatatctacactaccgttgtcgccgggattgtcctcgcttttgcggtttactctgtcatttcgtcccgggatccagatatccatccgttcctgctcgctcgccaatcgacagcagccccaatccgccagcagggtgagtctgctacttacagatgcttggaaaccccacatggcttgcctctccgcttcggactgaacgtcaaggacccgggcgccccgaaatggactggcggtcgaagaggagacctgcgcgatatttggaagaccgctgtgcgtggagctctgaatgaggatggtactctttcgggcaagcaaggcaaaatctacactgtcctgggtcgaaaggccatcgagcactctttcggccaggtgacacaggaaatcaatgtcattggccatcatctccaaaacgctggcgcgaagacggtggctgtttgccttacagactcaatcgagcttttagctacaatctttggtaagttccttatcattccatgtgtgagtctcgatgtctaaccttgcgcaatctagctggcgctttttatgggtataaaacagtcattgtgccacacaaccttccagcagagacattatcagcccatcttcaaaaggcaaaagcggatgttcttattgctgaagccggatctctcgacctgcctctcatcgtaaagggtaacgctcaattgtcgctcgtcctttgggtcgccaagtatggcaatagacacatggattggaacgcacttcccgagaatgtcaaggatagtttgaaggttgcagtttggcacgaactggtcgaggagttcaaggaactcgccagctatgatgtgcccgagtacgacccaaagacagaaacccctgctgtcaacaccgtttggccgtcttcctcacaatccggccaatttattgatttccagccagaggtaagggtgacccaactcttgtgatattactttgattaacatccaactagaacttggtgtctgccattggagccataacctccactatccctcgcacccagcgcttcaacccaaccgatattgttctttctattgactctctttctcggtcctacccgctctgcacaactatggctgcactgtttgctaactcgtctatcgcccttaactctgtcgctggagagaatgttgattttgccctggccacggctggtgtgtctcccacagtcattgttgcctcgtcgcagaccatggccgaataccacgacaatatcatgcgcccgcacactggtatcatttcctctcttggacgctggcttcaggcacggactttggatgcaggaaacatgccgacgcgcaattctttcagccaattggctcgtttcagtccgacttctgagctttctctagatgaattgcgcctgctttgcatttcccaccgaattgatggcaaccctgccgcccatcttacctctgagcaattgaccgagcttagaatcttcactggggctcgggttgtgtatgccctgactggtcctggtgttgctggtgcaattgcccaaacaaatgcctttgactacagatgcctcaccggccctagccactttggcgctccgctgagtagcactgagatcactctgatcaatgtccccgaagattctcctgatggaacggaagagggacaggtatgtcaggctcaattccaccgctctcatacataactaacattaactttcttagctcaccgtctctggccctgctgttgtcggcggcaccaccactcttaccggccgagtccgcatcagcaaggacaataccttggagttgtgtccctgagcgtgtcgatcacgaagtgaccatttgaaatagcatttcttttctttaagagcgtacttgaaacttgaactgccaggacgttttgtatgtaactgaccgaactattgcgtgtatatgaatagcacctagcggggtcagatgtggcatgaaataaaagatctattctctgaaatacatggccagctcaagaatatctgggaagtacagtaatatacatgccgatgtggctcaatcaacaccaaaaggaatcataataaagctcaagcgttttcctcagccttttgttcgggctttggcctgagcaatttcttagccaccttgtccccaagcacattggcgttcttgaccttctgcaactgcgagatcaagacatctctaagctcgttacagcgagtcttgaaactcccagtgtcttgtgctgccttgggcaacccaacggccaaacgcatgccgttgtagatggcaaggttctcctcgagtctctcaatagtctcaaagctagtagccgcatcgtccttgaaatttcctcgtgaccaggctgcgtcaagcttctgagcgtagccacggaccaagtcaatgtcggcctcattcatttgcgcacatacagcactgagttccaaaagcgtgccaataacaaaaggttggtgtttggggtcatcctggatgtcctcaacggagtgctcgggagcatccatcaggctagctgcctccctggccaatctcagagccttgacagcggggttccccgcggaattgggtttcgcggctgtcctgtgaagctcgaagaacagacggcgagcgatgttcttgttgccgaggctcaggccggtgcgttgggactgtctggcgcactcgataatggttgaaagcttgccggcgtcgctggttttgcgaatgatgtactcccaccggtcgctgttgatggcgtagtttgacatccggagtgcactgaggtacgggaaaaggttgctgaagttcttggccgcgaccatcatcttgagaacctcgagcgcgtctttcttcgatggcagatcgtggcgcgtcttgggtgttagggtgaactcttcggtctcgctgatcttcacggtaatgggctcattttgcaattgtgtggcgtatttctccctgaacacactctttctctgtcgcttggggagagcaagaggtatgaacagctcattgcggaaacgctccagagcttcgtctaactcgggggaggatgttgaggtgaaggttgggattgctgttccggtcgcctccgatgagaatttgatacccattatggatagattaatgcatacctgcgtttgaaccatagctgcgggcttgcatcggtctcagaatagactggcgcaccgggctggtggtgctctggcggaagagcctgctcatggcgaattgcgccatcatgtgtgatcagaggctatgtatgaagcgatgcagggtatgggagtagtggccgatagactctccccaaagcaaaaacaagaaaacgagactgattggtatcctagggttggacgagaaaaaagattcgctgttatctgcaacccgaacgggtaactggaggcttggcggaaattctgccgatccggccaaaactcgactccgactttcttgacttgacatcctcatcacaaccatggcggctctaccagcaatgcgcccgctgggctgcttgaggtccttggtgagggcttcagagcctattcaaccctttgtcaaccgtcgattcatttcgacggcctattcaaagagacccgaacgggtacctcttcccccgaacatgcctgagcaattcctatcccaaatacctcttcgctttcgcccggatcctggtatgtcctttcagttgagaaaaacagacgcgagatttactaatcctcgctatctcatgtagaccgcgagcccctcaagatctaccctgctccgccatccgctcgcaaagcatgcaaagatcccgtcggagcggttaccgaatcgcaattggcagtcctcgaccccacgggtgaacgcaaggccatgttcgactaccgacggaacccgcgcagtgtcaagaccggcgacatcgtacgagttacattcaagaacggcgacccattcaacggaattgtgatgagcatcaagttacgcggaattgaaacgtcgttcctcatgcggaacgaactcactcgtgttgctgttgaaatgtcggtcaaggtcttcagtcccaacgtgaacagcgtggagattgtccagcgatcggagaagaagcgcagaagggcgagattgtacttcttgagagacaagaagcacgaccgccgcagcgtggagaacattgttgccagctatgttcgccagaagaaggctttcttgggtggcggcaaccgtcggcggtgattgagttagagggcgtctggagtgaccctcatttgcatacgtgtggctgtattactacctatcattttgtacttcatctgtgtttataaactgcgatatcaaatacaattttgagctgttctattctagcgcccatgccatcttgtaccatgtttctgtagccaaggtaggaaggtctcacctggtagagggaatcaagtatatacctaggtacgtatcggataacgcccgcaagcatatagacatttttaacggaaggcaagcgctctataaataggaacagtctctataaataggaacagtctcagtaccaaagcaagtctattcctaacgatataatgctctacgaccgctatatctgttcagaaagattaaggcaccgactttgactagttatatagtgaaatgtcggctagattatcggcccgagctgaccgaacctgagcctacctaggtactccccttgccagtccagccaccttatggcccccgacttgcaccccccagcttaacatttgctggaaccactaaccatcaagtcaaacaaaccggtacatgtactgatactctcatgtcttctgtttgtttctggggtgacaaacagcggcaagttctgagccgggacgtcaaccacaacctcatcccatcgacccgtcaacagtatttacaaagaccagatagatgagtcgatttagttgaattaattagtggcgttttggttgagctaatgattaatacatttcaaagtgtcaaggaatggcctgcatggtacctaggtagtgtttgacctagcttgggaagcgactgcgaggagagtttccccgcgttgaggctggggtgactttgcggggtacccctgttgtggggtgcatgcgtcaagtatagggtcatctatatggccatctagagacaattgccgcacagacatggtcctatgcccacttgtactatccaatcattacttaagggaactaattctgttgaagtgcggatatcttttacatctcaatcccacggtaaatggtaggtttggtccgcggcaagatggaagccgtcgccgtgagcgtaagtctctcttcttaccaaaaaaccatatttgactacaggactaactttttgatgagctcttggcactgtctgagggatgcggagggtttgtcatataatactgtctgtccgctcaactttctgtggaagttaagaaggttcaaggcagctctacaacatctacctcaacaatactagcataatgactgaactctcgacacccaaggccatatctgatcatattgactatgtcaacgaggtggacccctcgatcatccaggcctcttttgacaccttgcgaggtctaaacagagaggacctagatgcattagagaagggcttgttgcgtaagattgattggcgtatgatgcccaccatcaccgtcatgtttctcatgaggtaggtttatgctgttgcaaggaagccaaatttcgcactgacttgattcagctacctcgaccgcatcaacgtatccaatgcaaggctggccggcctgcaggaggaccttgagatgtcggacaccgtgtggaatacaggcatatcgatgttttatgttggttatctcatcggccagcttcctgggaacctatggctggccaaatctaaccctcggactgggctttccttcatgatgttggcatggagcatctgcacgatatgtatgcccgccatgaaaaggtaaaactgcttaggttaaactcaccggaaacttgagctgacgatctccagtggggtgggattctgcgtctgccggttctttgtggggttgaccgaggccccctttttccctggaatcgctctccgtaagatattctcattctctaatatacccctacttactattggcagtgacttcctcctggtacaataagaaagaaagccccacgcgaatggccatctggcatgcaggcaataccatctccaatgtcatctcaggtttcctcgccgcaggaattctctacaatatggacggactccttcagctgcacgcctggcaatggttcttccttatcgagggagcagcctccattctggttgccattgttgccttctttcttctccctaattggccccataataccaagtggctcaccgagcaagagagggagatggctcagtatcgaatcatggtttccaatggtgggcacgaagagactcagggaggcacgtgggatggagtcaaagccgccgttaaagagcccttcacgtggttattttgcggtcttcacttctctctcgtgaacgcccaaagcttcaaggactttttcccctcggtatgactgttccactttaagatgcagtggattgctaagcgctaatccaatgtgacacagattcttgcaacgttcggattctctgagctgaccacttacctggtccaggcccctccatatatcatcgcgtacctatcagctctcgcaattgcgtactcgtctggcaagtaccaagaatcgtgctatcacattatcgtgcccattgtcctgggtgcagggggagcggcgatgcttatatcgaccctcaatgagggtgcgcgctattttggcatgatcctcttaattagtgggacttattcgggcctcaatcttcagctttcgtgggagacaacgcttgtgccctctccacggagcaaaaaagcggcgttgattgccattgctaattgtctcagccaaaccagtcattggttcagcccgtatttctttcccacatcacaggagccgttctatcgcatgggaggtggtttgattctattcgggtgtatatgcactgtggtgttgtgttgggcaatcaaatatcgggctaaggtcctgaatcgaagattagatgccacagagggatggtccagagattgcggagtcgaacggggctggcggtacatgtattagacgggcgtgctagaagaaacacaagctgcaatcttgcgtatcaagggtgaaacagttatattcgtattgaaatatatcatcttgatcctgttttcggggattagatttagcaacaccaatgaaatacgcctcacccaacgcaaaacatgtcaattaataagaccttccttcttcaatcatccaacatgccaccagtctacctctagagcaagagggggaaatctaattgattacatataggagaactaaaggtgcatcactttgtcaatttagcagtgaatacgccacaccgtggagaagaggtgatcaagtacgaagggtggcatactggttactagttaactacatagttagttagtatactgttaggggttttagatgcgaagtttcctaccggcagcaactatgcggtcctaggcttttcgatgtactagggtttgaatattgtaggaaaaactacagccaattttaccactagaccataacaaaaacctcggttcctatttagggcctttgggggccatatcgaagcttgagaaaccttaatgaaacatgatcgtacatagacacgagaattgttaaggcgtatcaactggtctgattgaggttataggtaaccaagctgagcgaataagtcaaattcggtctgggggacatccatacttttcctttttttttgtgaaatcgtactacggtcaatttacatcaaaatgtctccgtgtcccgcttaatatccaaatatccggggaaatgtttcctcagaaaaagctgccacggcactgataacgctttggatatttgccgccatggagtcttcgtcccacgggatatcacctcccgcggagcggagatccacccaactcgtagtttgtgagcaaatgccgacagtggaaacttgtagtttgaaactgacttgaaatattacatataatcatggtcgaggccttgagctttgcgtcatgaatcatcaatgcgagccaccttgtgctcaagaattatcatgtctacagcagcaacagtatcgatcgcggaaacttgcgcggtttccaatcactttcccttgagacaatatgctccatatccgacaagaaggtcattgcccgcagtctggatgcgctcaggaacatcaaaggggcttttcatccatcgaagagatttgcccgagcgcatcgaacagtgggggcctattctattatcagcaatgggatcatccaatgctggtggccgacagctcgatgggattggaggcgccacttcaactacttcgaaagtagcagtcgttgcgaagtcagctcgaccgggcatcgatgtggactatacgtttgtccaggttgcccctgatcaagcaaaagtcgatatgactggaaactgtgggaatatagcatctggagtgggtcctttttcattggacgaaggtcttttgagggtggaggcaggtcaaagcgaggtgaggaaggtgctagatattcatgtttatctcagagttgactggacatcagatcgacgtcaggattttcaacacaaacactcagcaaacgatctcggaaaccatccagctgtcgccggagggcaggcatagagacgatggagattgcagcattcccggtgttgagggcacatcaagtcccatcaaggtcgcatttctcgatcctgagggtagtatgaccgggaagatgcttccaagcggtgcaacacaggagactttcactgttcattcaaagacactggggaccatccaattgcgagtcagtctcgttgatgctggcaacccatttgtactagtcgattctaggtcgttgagggtgaagggctacccaacgtggccagctgcagcggaccctgatttcatgttgcttgctgaagacattcggcgagaaggtgcggtgcgatttggattggcctcggacgtgaaaagtgcgagcgtggttcgaggcacaccgaagattgcatttttatccccgcctgcagatataagttcagacatagatgtgcttgcctttacaatgggaaagccgcatccgagtatccagattacgggtgccgtatgcatcggggcagcggcggcaattcatggaactgttgcgtggcagttggcccacggatcgacaaccaataatttccccaagcatgggttggaaattgacgggcaaaggattgcgagtccttccccagtacgaattcgacacccagctggtgttacgcagactgaaacaaccttgggtgtaaatggtaaaggggatattcatgtgaggcaggtgggagtgctaaggaccgcacgtcgtttattcgagggaaatgtgttctacaagatatgagcttataaattatcaccaatcgtttagccccaaggcagagcagtggctcagtaggccgctcccatgccgcgcactcaccttctgtccatactccaaggaagaaacacaatccctagcttaagacagtaaaggtgaggcaagaaactcttgcagtctattatcgaagcttggaaaaactgcatgtgatcatagggttctttctcatactggtcggttgagcaagttgagagtgcctagattttgaatatggatagcaagttgcaaagtttccctctcttcttttgattggagggagttgctttctatagcaagtaataaaaaccaattcaattccgagcactagaacgaatcaaaaacctggcaattaccatgccctagtgatatagcagactgtcctgtatagatccattgaagccaaacagcatatcatcatcgatctgttcatctacatatgaaccgtaaccggggacaatgcttggggcaataccactgaccacacctagatgatctgcggggatatcggagggggcattgtaagcccgctcaagagagatatgcccttcatttcgccttgtatcttgtcgaataaagctttgaataaccatatctatgtccaattcagaagtttccgtctccggaggtgtcatttgagcaggcaaagcggatgttccaagagattcagggtcaagatgagactggtttcgaagatctgctatttgttcgtttgcatcatcttgcggttggggatcgctgggtgggcgatcttggctaccgatatctactcccatccggtccatcaaatgcattatcacatttttggcacgccggacagcccagttggtttcttggttctcttggaagacatcaaggcacgtccagagatttgagtgggctctactgccacctcctcgctgggcagcgactcgaacatggatagttgcggcaacgtatgtcgcatatgagatcagatagggcgcacgtctgatggagaatgctttatcgtaggcttgtaggatatttattatgcgagatgcagccgctgtgcatatggcaaaagagctgatcgcaactgactgatcagttgtatggagatgaccttcagcaacgaagggtcggtggagaagaatgagcaggacgttatagagtgccaagagagagaggacatggggtggcggtgtgacttcttttgcagcatttgcaaagcgtaaataatccggcagagcctcataccacccattcaactcaatatccagagctttcaaagtagtgagcaggtcctggggcgagcgatttgagctcctctctgagtaaaccttgttcagaataccgttcaagatcaacgacagtttgcaaagttcagtaaaggttgagacactgtatgcgggcgatcctgggtatgactgcatatccgtatatgcgaacggttgccaatgctctagttcttcataatgatccaaaaacgccaacgagacctgagtgtcaaagtcctgtaaacttgctggacgtccctggtagagcgattggattttgtcgacaacaaaagcaccccagaacactcgacgtcgtatctctatatcttcatccgagagacgtcgcatgttcctgagcatggtagcatctacgtgcatcccaaggtcgatgatcatcctaaatgctgtaccggcatagagccaggcggcactgcgttcatctcccaatgcaaacagggaactagtcattactaacaatgcttgaatagtggtgatttcacttcgatccaaggcaccgcccagcaattctttgactctctggcgaaatgtccatcccgcagtgcggacatcgtcgggatctcggcgaacctccgggcgattactgaattttgacgcaccaaagtaaatcgcattcaggaggagcttagaaaagtaaggaccaccggtggccatatctcgcataaaagccgggcgataggtaatcaagaaggaatgatgctggcggttccagtggagggatagaagatgcattccaagttcaggatcaaccccatcgaagtccagtttaccttgccgcaaattcaatctttctaattgacctgcttgatgttaggccgtgataataacttgtgacaaacgggaactcacgctgataagctgactcccccatcaactgtttgcgaatatgctctaccggcacctgcggatcccgtgaccgagggtgactgtgtctatcagtcggtgcatcgtcaaacaatgtgcttgtaagcccatggtagcttgagtcaccatttggcgagatgaagattcgtgatacagcggactgagatcggttggcacttgatgaattcggaatgtctggacgaggtgggctttgctggcgctgatgggatgggcttggggaatttatttgtccctccgacggtgtattgacacgccctagatgtcgccggagttgttcattttccgcttccaggcgtgatagccgagcatttgttggtctacggctggtcagtgacgaataagtgaaaaggcagatgacgtacctcggtctctcaggtccgggtacgtaggtacatccttgtgaatgtgtcttgcagttggaacatggtcttccgttatcgcaacggaactatctgcattagatcgcggcactaagaacttgagagtttacctaccttcctgcgtcgacagaaggagcaggcctttgcggccctccgcggcttagacggggagtttttctccatgaactttttttttccctgggttcttccgcaagagaacgggaagaggggatgattatacgtcttttcaattgccgcggcaagtctctttccgttgttcgtcctccgcccttctccgcccccacatatcaaaaagtataaagttggggttgtcaacattcaacctctattcgtcgcgctcaacaagggtcatatttgctgcttgctcacattatggcccacattgctcaatcagaaaggtctgcaccacagaagctgcaacgggtaattgctttcatattaccaaaccatcttctgttagctaacctgccagatccataccccaccgtgggtctccctcgtggctggaggaattgcaggtggagttgaagcagccataacagtcagcccaacgatactccatgtttgtatagcgattaatatttggcagtatccatttgagtactcgaaaactcgcgttcagctgttggacaactccgccgttaagaccctcaatccactacgtctcatttttcaagtggcaaagcaggaaggtgttagtgcgctttacacaggctgctcaacccttgttatcgtcagtcatcaatccacatatttgatctcaatctatattgattcaatgtacagggaacaacggcgaaagctgctgtgagatttgtttcctacgatactatccgcaattcccttacggataatcatggagttctatcacctggtaaaggaatcctggctggaatggttgcaggagctgtagaaagtgtcctcgctgtgacaccaacggaaagggtcaaaactgcattgtttgtgttctccgtcattgataactacatctatcaccgctaactaatctgcgtagaatcgatgatgcaaaaggggctcgtgaatttaaatctagcctccatgcgataagggtattggtacagcggcacggtatcactgagctttacagaggtcttttgtccaccgcgatgaaacaatcagccacatcagcagtccgcatggggacgtacaacatgctgaaagaagccactagatccaagggtattaaaacgaacgtattcacgacatttggaaccggcgccatagctggcgtggttactgtttacgctacacagcccttcgacacaatcaagacacgggcccaaggtgttcaaggagctagtatcactgaagcttcgcggagcgtgattcgtgatcacggtattcgcggattttggaaaggcagcagtatgcgacttggccgtctacttttgagtggtggtattgtgttctccgtctatgaagaggtagccgacatgctgtcgccgggtacccataaataaaagtagcggggtacaaattctgtgtagctagataaatttagaactgcatgtaagcatcatataaaaaaggattctgataattatggcgcgcggtaggagggcaaagtagcaagttgcttctataataaaaaatggaatttcagagacaaatgcgggacttaacttgtgctatcgtcttaagaggatagcactggcggataaacaaattgtttggaccttacctactttccaccaaggaggagtgattggtgtttcttttatacatattaactcttagcatcggcagccatagctttggcaaatatgtactgcatttaaacttctaggatctgtttttacactaaacatattctagtgaatattgagatctttaagcatctgtctgatactgtgcctcatagcgttgctaagtatatagcgagttgcgccacactccagttcactcgctagcactataggtgacccaaattctgactataagacgtccttgactttgtatgtcctaaaaagtgcacaatacgtgcttgcgatggtatatttctatgtcttcaattcacgaaattgagagaaccaaaattcctttagcactagacccgttcaatgattccaacgatctataaacttaatgactttcctcgcagtaatgctccgctcaaattcttcaaggtcattcacaaacacaatccgtgcaagatgctcattctcgggaagtataagaaagaagtcctcgattcggcgtctgagattgtcatcagatataacgccatcctgtgaacgtttgagcaagcgaatctccaaagttgattggggcgtggtctccagtttgtccaaaataatttgccactggagaatgcccaattccttcgtgtgcatcaaggcgtcgacattgtcgaactcgaagtacgagccataccacttaaagctgaagcgatggtcacgcccgcgcatacgcaatactcggaggtgttcgcggtccgccttaggaatcacagcagaggccgtatccggtaggggatgaacggaaccaatatcaccggtgttatagcgtattaggggattgcgtagtctttgaagagatgtctgcacgacgaggcccggttcaccaagtgggattgggcttagatcggaaggtgaaacgatctcgatcagcatactgcgcgtgtcaaagacaaaatcggtgctgatgctagtgaggctgtgctctcccgttagatcggggctgctgattgcccagggacccgcttccgaactacccagaaaggaaaggatcttaacgccgctcagaatcgtctggatgaacacccgctgggggctggtaaggggttctgaagtatatattatcttcgccaggttgatacgatcgcgataatcctgaggcaacatcgagatatggtgaacaacttgaacgatttgactgctctcgccggctaagacattgacatggtagtccgcgagagatctagcaacttccgtaggtggcatatagctcccggcgctcaaaacggtcgctccagcattttccatgatctccgtcgtgagatcgagggacctgatcattccttgattaggtgaactgtgtcattttatattggcggtctagattcgattacctgtagaaccccccggctaaatgggtggataccacccaatctcccggctcaatcataccacaaagtttgataaagtttcccatctgggccctctgccgacggttctcatatgcatccacagcaaacaacataggaatccctccagagccgccgccagtgatggacatataagaactttgccgatatgtgttgagggggtccatatcatgggtaagccgctcaatgaccttgtacctgaagcaagttagcacacccgcggtatgaattactcggtatgctgacattatcttacagcgctttcttgtttagcaatggctgttcctggagaacgggtttcgcctcttggtcaattgactcacggagtctccggaccgtgtcggcatcgggaggataatcgacatctggattgtagaacgggtggattttggccacggctagtacttctgccaattggtaacgttctgtggccattttgcataaatcctttgtagaaagttccgtaggaataacttcggatccgagggggtaccaggataattgagtataatggggtttcagcggaagtagactgggagaaaacgaaaaggagatagaacaagtatataaataagccgaggtgggagaaaaagaaatgaaaaagtagagatctgatctatcgaatgcataaatatttcaatcgtactgcaattaccacacagattgattcaatacggtgcctcaaaaacgcccctcagcattcgccctagtgtattgtgacggctcgaaaacatacactataacatcacttccacttcaacttcaacagaagccaaaagccaaaagtcaactatcgaattacttgcctcccatatcttgaaatcccagtcaatcgcctatcatcatctcttgatccatgaccacctccttggaaatgcaatcattactatcacatgtcgggacccagatagaatatcgatgaggcttccactcgcgcggggcaagtgtggatgtccctcgcagctctatcaaggtggacacaaatattttgtcctcgctccatttcatgctaaagcgtccgtagagaccatcattcagatacagcatgtctgctcgcttggttgtagtgtctttctgggttcggcgtgcgatatggcggtatgatcttacacatagatccgcaggagcaactccagcccaggacggattttttaactgttcaatctttgcgagagaggcgcaatcaaagctgacatccatatcggctagcagttgcagcagtttggggtccggggggcatttaccgctgggattttgtcagtcttgcagctcggtgatatagatggagtattactgaccataaaacgggtggatattaggcaatgcatttctctgtctttgatactgttggacgatcttctctgtaccagctacaaagaacagtacgtcattctcgagatcacatggggttttgctgaaggaatgcatcatcaatcgctccttcctcaatgaatgctccgtagcttcccagtttatttattcttcttgtcaacgaccccatgcgatatcttccccggtcgtttagacctgaagttttatataggtagttattcagatgtaatttgtattttttctattttagcaaactcactagtgtagccatatgcagcacgtaaacatttgaaaatcgtttacaacatactcgcgcaaaatttttgggtaagttgaccatgcagatttcaggccacagacacagtctttttcggccaaaatagcaagttatatggatccgctaaggagtgggtgcaaaagatcatcaacatcctagatcgatattctgcccaccttcatccagttattgtcccacgggtcagacagccttgcatgatcgttatggggcgctggaaactagcaaaaaattgcagctataagtacgatcgtaccgacgctttcttgcttcgattcaatctattttatttcagttcggtaaccccatgcaataaattacagggcaagcggaggaatggcagatctcaagaccttgtactctcctaacgatatgaatttgtggcacctgtagggatagcgacatgtaggataagtcagcaactgtgacgtgtcacaatattatatttcgcttctacatcattattagtcgtctgatcatgcacagtatgtataattcatgtgtcttttctctagcattctcaacgcgttgtgtggagcctcgggaacctagggtgagacacggaaagcccgacaagggactagcagaataggaccagaccccagcaaaggtaatgcgagatcttcacgtatactcaccgaagcattgcgtacccatcgtggtgtggtctattggcggagtaggcactgtggcgaattttgctgcggtgatggtggagcattagggaattgactagcggtaccaatagtaataccgggctggaggacagggccatgcacataacacaagagatcgtgccttgcacgcccttaaaatgtttaggaaaacgaaaagaaatattgagaggtcgaggtaagtcgccgccaataacaatttaacaatttcatctcacccaatgatcccgatatcagtgttgtggctgcccttaatgcctccatcaaccctcgagaccatcgtcttaattctcgactcgcaggattcgaagccggggcttattcgtttgaagtggcaaataaaagcaaagaaaaaaaaaaaaaaaagcaaaacgaatatggtgtgtagtcagagattgactactccgtacacattactgcgtactgcaggcggatctgatagttcctacacagctatacctgcatgcgatgcaacctgaatcttcgccaaaccttgccagaaggggaagaatatctctagctgcacaggctgtggccaataccgcgtaattgttcgatcaacattcctctttgtttacaattgatagtttgaatgggtccagttcgcatagtatgaccgcttgcctacgggcataagtttacctgttcagtggaaattaatgggacatgtcatagagccgaaagatgaggtgcattgcctaagttctatcgcgtattccactactgcgtaccctgcttgactgaacaaatccatatagcaccatcagacacagcacagagtctccaggactgcatcgccaagtccctaatccaacatattctccgttaattgcatggtaagtcccgaccatatagcagcgctaggaattaccttcagacaacagcacgtcatatttgggctgatctatcttgcgctgcacaacgaatagggtcttccctgcttccaatctcggacaccgcatctgctccagtagcgccagccaggtagaataggggacttcatcgccaaaaagaataccggcaccctttccccctctaattggctttaggatatattctttccggaggttttctgacgctacacaagcagtgataaactgatcaagggccgcggagcccggtaggatagtaggcgttatgccccgatcaaggcattcagcttgtctgccggtgataatacctctagagaccagagtctctagttcttctcgtacaatgccaagcattctcttgtcgtgagcaagtaggattgtcaaaacaccgaacactaatctggcgtctaatctctggatcaagggcgtttatttcccgttagtgaagttcgaggccaatttaatgaacctcttccacaagttcaccagattcggtagtaatagtgtcaacggcacctgcttgggcgaggcagcacaatttaaatccagtgtccttcgagggatctgggatgattcggagtgcttccggggttataagtcgtggtttaataccaattcgtttcttcgcaaattcgataaacataaagatatcaattccgtgttcctcacccttgactaggtgcaaggagagcttgttatcgaatagtttgaataaccctccgaggatcttaacaagtcaacactagcttcttctttcgtagaccattccttacttactaattcaccgtcgacgcagtgcatcagaccccgagattcaatattaaatgccgaaagcgagtcttaaccaaatcctccatacataaagccattccaacaaaatctcgcattgatttcgcagatacggaatacctccacaccggcttcgtcaatctcaaccaagaagtccggtctccaggacccctgtctctcattccacggtcggaacagggttgtgtttgagtggatccactttcgtagcgacaaatcgttagtatactataataacctattaccgacagtgaaggatgcgtgggacttacgcgtaataaatcttcctctcctagttctaagggcatccgctagggaaactgggctcgatcatccgtccaccatcgctcgataatatcttcaattgctagattcaaggcccgatgtaattcatctaactcatcatgatgccgttgagtgatcaatacgggataaggggatgatgcatctaacgatccagcaggccaagcggaagagcatcttttcagtcttaaggtataagtgtcgcgggccttatctaagaggttggcatctggcttttcggatgatataaatgcgaagtccacagcatctggaaggcagacttgctagagacggtcgaacaatctgtttcgcatttgggatgcttttcaatggtagcgattttgaatgtaaattgaacataaagacaaaggatttatgagacgaaaggaatcgttaattgagttctaattagctaatgataactagcaatcctaagttaactatcgatcactctgtgctaacttgtatacatgcaacttttggtcttttacggacctaagtctacaaactagtgtaaagttcaaatgcaatgtaaccctgatgcgttcttctaatggcccatcattcagctgagtattggccccacaaattgtggacgactttttgatttgattaacatgcgagtcggtcgtacatggtggcgcgcacagggtggcgcgttacacatttagtaccaattacaagctccaattggaaccacatatgcaagcccaataaaagatacccaagggctttcatgcgctgtgcgatccaaatggtctcgcgtcccatcggactcgtcggagatgtcggttggggtccttgacttcattccgagaatgcagccatcgtcgattatccatcaagattattgacccctgaggaaggctcttgggctctagatggatagtctattcctcggctctatctctatacagaatccccttgagttcgtctagcgccttagcagcgttaggagttaacggtatagtgatatcatcccggaatcgtaattgactaccaccttttccctccggcttgactacgagcaagttgctaacaatatactgctctcccaatttcttaagaaattcaggagggacagtgatcttatagttattgctagacagccatttctgtgcgaaaggggagagtaaggcgagcagtcggtcgacgtttagtatcgataacgttccacccccacagcgatccggttgaatgacttgaagagcaaagtatcgcggcggacactcttcatagctgcagtccgtataccaatcaaatcgggacattgtctctgagcgggcttagtgcccgtggctttggaaggccgacggagagggccgaacatcccaaaaccagccgcattcggcactatgggttatcggaagaccataaccatggcttttgtggaagttggtaataagactctacagatagacgcttttttcatcgctaaaccccaaggccaattgaaccactcctttaacctccagagtctcgtgtacagctctcaggtgagtggcctctgaggacaacttaggtttagtaacttcaatcaggggaacgagattggaagttcgtatatctccttttcgtaattagcagtgcccaaggaagccctaaaacaatggttacgtactgataggctgcgtagaatatctagcagctttcacgccaatcgtacaaacagcacggagatagcggtacattttcggcatataaagatcgcagtctaaaaagaagttacgtttcaataaagccgtgactgaaatgggagtctgctttttaacaaggcaagggcttggcgcagtctttttatgcatcaaaattccttataatatcagatccatatccttaaacacgccattttgcggtactatatacctgtaggaattgtacatattactgtagtagacttacgggattttttttctttttcctcatttccttttcttatgggcggaagactgatcaggttgctgtccccggccatcggtggactcgctagcaaaaacgaaagaacctacaagtcacataagttgttctgcaacagcgtaattaatggctcgttcgggaataggtgttttagcagatcatgttcatgtgaagtgatcagcaacataatttactttattgaccgatgcatggtgatgactacccacccatatgtataagcgaactcatacggggatctccggtgatctctatgtactacgctcgtgttttcttactaattatttgagaaaaaaaccaagtcagtcgtgacgatgtcttcggtcccggatctcggcaccctaacgtgtagatgctgctgcatgttccacattggaaagttcatatacctagatgagtgagtgtttactttcatgcaagggcctgtccccctagattcagcaccttctatggcaaatactcacctagtaccatactcagctacctaggattatctgcgacgtcgacgtcttgactcaaagctgaaaatccaactatccatctcctcaatgagcggcaattgcgagggccatgttacgccgatgggctataaatggcgctcctccaaatggtttatactcgcaaccattgcagttgcgctgtatgctggtctgttccccctccctagcttggttaacctcaccctaataccaatcagagacatttctttatggatttctagtgcctttcctcggcgacatgcttcaacatcgtctcaacgtcccgccctctaaaacccaagagttgacattatccgttcttgctatccacggtgcattcgccatgatcgctggccctattattaggcactttaacgatcagactcctaatcggaaggttccactgctgttatcgcttggcgtctgcattgctagcacttgtacggttgcgggtgctcgttcagtacctatactattattaggccgtgtcttacaaagtatcgcgggatcagcagtatagatcatcggctttgcaaccgtcgcggacaccgtaagtgcgaataatataggttcggcaataggattagtgatttcatacgccaattcagggacgattagcgggcccgcaatctctggcctactgtacgagattgtcagttatcgtgtgttatagacaattccgctactagttctacttatagaccttgtcgcacgtgtacttatgattgagcgtccgtccgaagtctcttcctctaagcccagtagcccgctactaaatcaagaagtccaatccagcaccgggggcttctagatctcgctgctctgcaacggccgtatcctaatctgtttggttattacatgttcgagcataactataagtacgagcctttattcgacgcttccctcgcacatccaagagaggtttgaatggggcccagattcagccgggctcctatttgctggtcttactattccaggtattctgatcggtccccttgctagttgggtccgtgacagggttagggcacgatatccagcggtaatcggttctattctccaggcgttatttttaaccctttcgggaattgcagggagcgatagcttctcctggttcagtgcccagactagcggcaaaagtatttactcaacttctgtcattgctatcggcatattgcggccatttgtgtctagtatcgcgcctgccgagttgaccggtaagtggcccttgtcccaaggatttgtatacgacgataatgaatggatattaacagtctattaacagctgcttcgaaaacgatgcataagaagaacgcgggtcatttgggggccgaatatggcgtatcacgcgtaatcgctataatggacgttactgcctccctcggtacgatgattggcccaatcctaggcggttctcttaagacactcttcggttatgagtgtatgagcttcacgtggagtaagtcatccgacatttacggtattcgtcgcttatagttataggttttctgtatctcatgctcgctgtgtttgcaatgtactttctggaatccaaggaagcgaataaatcgccccactctgaagaagatgcttagtgccaggtgctagttattctacgcctatgcaagagaatgaccgcaaggaactcgcgattgatgcggtgaccttcaatgtacactcaaaagaagacatagataccacataagcttgaagacagatgaaagcaatttcttcgaaatgggcatacatgttgtcaggtatctacaaaacttaaaagcatcgataagatattagacagaaattaagtgtatggcgagtgtactagtaagtttggtctgaatgtaacaatctacagtgacacctcttaaatttcagcaccccgtcagctaccgccttcttaaagaaacgcaccgcctacttaaatagttataccgcccattatttaatatttttgattggtagattacgatcggcagaataaggggtgttgaaactaaggaggtgtcactgtaggttgtggtagtacttgcaataccacaatacggcaaaacaggggaacattgaaccttccaaggttggttccaaggttccaattggtttaacctaatacggcttagggtccacccgtggacccgtggatgggtggtttcgggtacgggccgagaagtgggtgttttaaggggaaaccgtattcaggctgtgcaggcactgctgcattaaattcgttattctcaccaacctcaccaacctgggtcaatcggccggtgtagagttgccaacaaattccggggcacggttttacctctccttttacgttttaaatctatggttgtcaatcctcattcgcggtcggggaccttggttagcctagaaaggcagcctaccttccccgaagccacagctgcgacgggatatcgagatgatccgagagccagcctcgtctagggcgagtttgagccaatccagtgcgtgcttgaccctctcgatacttagcacagcctctcccaagtccaacaacctggggccaaaccccaggatccgaatccatggccccaagatgcggctcaagtgatccccataaaacttgaagaggatgcccccgcccagtgcctcggtcgcagtgacctgatcttttgtcaacagggcttcagtgcacctgacgccacgccctgacagcgagatgaccctccaggctccgcaagaagagcatgaactgcccctcgtcgattccgacaaccccatgtgcgatacgaaccgtctgaaacaaggtggaccgaaacacggtaggctgtacaagtggctctcaggctcgaggttcgctctagccctcgcatcagctgcctgcatcattgtgctctgcttcaaccttggcttcctgctctgggttgtagatcgaaatcgcctgaaagatgaccgcgggatactctacgagggcgactgtggcagcgtgcgtcatctgagtacaggactgcacttactcattaacatcctcagtaccacactcctgggtgcgagcaactatggcatggtacatgggacccttgtgtatgactgggcgggactaacagtgctgcagcaatgcctctgtgcgccgacgaggcaggacgttgatgatgcgcatggaagggatacctggctggatattggcattcccagtctacgaaacctcttttacatccccaagaagcggcgtaccatgtggatatgcctggtactttcgtctcttcctctccacctcgtgtgagtaccgcataacttctttattgggttggctgacaggctgtcgctcttcaggtacaactcgaccatcttctctactacagccgcatactcgtacacgatatttgccggccactcctcgcttggaacgcagccacgagaggatcttgaagcaggcgacctgactgtagaagacaccgcttcattcgactggttatattccagcgcccagaatggcaccctgattcacctcgacacgcacgcgtgcatcgacgcctacgcaacaacttaccaaacaaagcacggcggtctgctcctcgtcaccgaggacgtcaacacgactctcacctacgaatgggtcgggttccaggacgtgtataaaccatgggatactcacatccagggcccgcccaccggcgatccatacgaatggttatgcccgccagatgccgacgcttactgcagcacctacctatcggatatttacgccagcgcagagcagggtaactggttcgtgtgtggcactaacggtaactataccgtgaactcgtgcctcagcgcgccgctgccggagcactgcaagttgcagtattcgttgtcgctgacgattgtggtcatcgtggttaatgcagtaaaggcaattatcctgtgctatatggccatcgtgacgaatgaattgccgatgcttacaactggagacgcggtggcttcgttcctgcaacagcctgacaaaaaggccctgggcaggtgtttgatgcctggaatggagatacaagagatacccaggagatccattgtacctaagaagcgctattacccgatggcatatgaaaatacccggaagaggtggtactctgcagtgaccccggggaagtgggcgctcgttgggttcctgtgagcagaccacacccctggcgtaaacgtggagcgataactgaccatgtcgtgtacatcagctgggcaatagcctttatcatatgtgcaggcctcctaggtctcgcgctgagcgaagacggccacgaagtctggaacgccgagttcgggtccataaacgcacaagccctcatcaaaggcaacagctggcccgagtccatggtcggcaacacaatcatcgccaacaccccacaactcatcttctcggctctatatttcgtctttaatggagttataacgaccatgaccctcgccgcggagtggagcacatacgccatctcccgtcgcggcgtccgcgtctcctggaacccgcagtatgcgcagcggagtagctacttcctctcgctaccgtaccgctacgcgatacctctcatgggaacctctgcgatcctgcactggcttatttcgcagagcctcttcctggtcggtattgaggcgtatgacgagcgattcgtccgtgcgccgggtcgcgacctcgtcacttgcggatatacccccgttgcgattgttagcgcgatggccgtctgggtgtttatgtttgcgtgccttgtcgggatgggccggatgaagttcgcgtctggtatgcagattgctggtagttgtagtttggcgatcgcggctgcttgtcatccgaagtatgaccctaacctggatgagaaggatcagcagatggatccccctgagggggttgagttcatgccactcaagtggggagctgtgcctcttgagggcctgatggggcattgtacgttttcggctgatgaggttgagatgcccgagtcgcagcgtgtgtaccaatgacttgtaagggtttttctttttctttttcttttataaaacagagtcgagagtcttcgagcacgccgcgagcaatatcgtttgatgtctggatcgaggggagaacgtataaataatcatccaatgagtggacggatacgcaggacttcctctgacgaggtttactagatatgggctacattgcatcctgaaccaaagctcatcaaagcgaactggccatcattgaaggaatgggtttaatcttggagtagcgcctcaaatcgagtgatgctaaactactcatactgggttcgtgggatatgctttttcaaccaggctggccgtggtcgttgtggggtttcttagatgctctgtatcgagtccattcattatttacctagcagagaagacacacatgcttttcaagtgttctgtctatggccatacaaacagctccaatatatcagcaccagcttcggatcgtctaagtgctataaagtcgtcttcaactggtgttgatgaatcgggaagtattcaccaccgatggtctagctcacaagaagttcttccacgaggtgatttgatcaccccgagtccagttcatctggctcaatagatgtatcggaaactgttggaaaccgttattcactttcataccagatttgagggagggtagcaacgtagaagcaggacaacatagagagacatacttcagattttctcggtccgtcaaatccaaaaacgcagtcgcatccagatctctcccttcgagaccaccctccatctgggactggatgcgatcgcgcttttgattttcccagcgcaacattagaccaaggatgctgattaaaacggcctcaatcaagtgtgacacaatcatggaccagatgccgagctcataggtcggtctatagttcgagttagctcttagttatagaagttaaaggactatcctgaggaaaaacgcacgattgatcagttttatagaagaatggcccagcaatgtttccagtgcagtaccctaggaagagcacagcgttggtgacgactttcttagtatggcctaaatacataatatgattagcttccgtgatttatttaattaagaactagaagaaagattcacataccagcggtgttggccatttgcatactcaaaacgagtacaaatgcagcattgtacgggcctgtcaggtaataacaaattaagcgacctacactgtgttggatgggaacaaagcgaagaccaaaggcgccggcaatattaggaatcaggaagataaggatgaaaaggcatcgtcgattttcgaagcggtcgttgaggtagacgcatatcaaaatcgagacagcaatgataaagccgtatggaatctattgcgtttcatgttagctgaagaccacgtggttatcaaattaatcttacctgcataagagtggtcaccaatgtcgagaacccaaaccctttgatgatgatagttccgaagtttgagataccaccgttgggaatattgcctgtgtagatgttagtcaatgcaccggttcggatctggcacaatcttggaagttacatacaaaccatgccaagaatgaagaacatgtagagcttataatccatgaaagcctccaggatctgatatggcttgagatgcttattctcgacaccagtctggttttctcgtagacgctcaacggcgatgcggcgctctctcttgctaagtccttttgctgtaacaggtgaatctgggaggaagataaacatgacaatgccccaggcagaacatagtgcaccactaaagaaggttagtaaaatggcagttccaaggacaggaggaaattgacatacatcacaagaaactcgtatttccaagacggtagcgcgcctttgaggtgaccaattccatagcctaatagtccacccaatgcaatcccgagtccgtttgctgtataccacagtcccagacgcactggctgttcacgacgggtataccacatgctcgtgatgagcatgaaagctgggtcagcgcaggcctcggcggcaccgccaagggctcgaagaacagcgagggtctcgaagctgttacaggcagcttggatcatgaggaaggcaccccttgaaaataaatgttagtattgagttgtactatctacggggtcagtccaacaaaccacataaaaatattcgcacccaggtatttccctaaaccaattatcagatgtatatccagtcaaattgtccggcgtgcaatgggagaatcataccgattggaagacgctgcatcaaaaaattggtagggaatgcccatgctaagaaaccaaagtagaagatactgctcagccagttataccgcgttccatgaagatcgagatcttcccgaatcccaaaaatagcagcgtagctcaacgttgtctgtcctcaaaatgcgtgctattagcacaaacttttggctaaaaggcataaaataggcaagtaataatcaataaaagaaacttaccttatcaatgtagaagaacgcatagcaaacagccaagtagggcaatatcatgaagtcaatcttccacaatagctttctcgcttccacgggatcgacatcttcgtggagctcgtccgggtcatcaaatagcgccatggccgtatcgccgtcgacatttttggcagacttgaatttggagtgttcttggttgctttctgcatggctgatagtgggaacctcggcgatattggcctttgagccaacatcttgtgaagcatggttcgccatagtggagttacctttgtatgacaggaagtggacaagaaaaatccacgaaattcgactagatggagaatatatatgtaatacaagaccagtgccgcgggatgggacggtaagaaatgtgcaaagtcataatgacaacctcgggacgaccccgagtctccctccatgattcgagacaatgtcgaaaagcccacaaagagcagccatctcgtatcccccgcgaatttcaaagcttgcctgccgcaaggggaatagtaaaggatcatctgcggggaagacccagtacggggcccccacgcgaagacgatctggtcaaaacgtggggaaggttggtcttggctgacgagtagagcagactggaatataaagcacagcttaacccggttcgttgcgctagtcgctctcaacaagtctaactgaatggtaaagtttgtctagcacaaagggagctgctgtggtcggtggaagtccgagaggtcggggattgtgccgctgcccaggtggactaaaccttgctatttaccccgacccatcactgggcgataaatacaggctactacggagttctctcatgccaaagcggccaccgtaggtttcgcctaacctagcttcgccgcgggcaagtttgtaaccggacaagcaacatgccgaaatatttacagaaagataaacaggaataaataaaacgtcaccgaggcaacattagagggagaaggcgaaaaggcctttttataaggtactgccgtggataaacgacagcaatactttcccagtaaaatggtcctgtaataattctccaacaaaggtaaaacgctcttctacaatagtgtcaaaagtccccttcggcatttataatgccaaggatcacttaagcctccaagaaagttaagggttgccgaggtggtgtgattagtccaaaggtatatactggattaccctagaggttatccatattgactgtagatcttagtagtcttacagcattatatatggggattaaaggtagggcatatggaaatttactacactattgtggaacaaccattaagatacactggccagcgaggagacattactcttggctttgactgtaaggacttcccagccttgggctacattgattacgagtctactgagaaagtccatagaataatctagaatcaggtaccaaggtactgtgtatttatacagctgtctaggagtggaacctatgcctggacgggatatgaacggttaccccagcttatccttcatgtggtctttggtcatactcggcaaatttgcgtgccgagatcttctgctcaaacatatgatccagctgctcaaaggtcctgcctttggtctctggcaagcagaagtaagtccagatacaggcaatgactgagaatccaccaaagatgaagcctgtcttgccacgaaggttaccttcatcagggtttatcatgtaaggcgtcgtgagcgtcataatcaaagtccagaaattttgcgtaaagaaaccaatgctgacgccgtatgaccgcaaccgagtggaagacatttctccgcagatcacgtatccaagaggtccaagagtgaggtcgtagaagaagttccagacgataatcaatacgcactggcccatggcagtggaggagttgtaacccggtaccacgtctagaatgccaatgatgaagagaatcacagtgagaatgagcataccagggacgagagctctgcgaccgatcatgttgatgacccaccacgagcagatgtttcctaggacaccaactgcagtcacgccgacgcccatgtcgaacgatgaagaggtagggatgccggcgactataattggaaaagatctattagttaacaaaaatgaatgtggacttgatgagacttactttggaagaagtacgttgagtagctgagcacaaagttgacaccactgaaagagttgatagtccaaaccgacataacaatgagggtccgacggagatcagttcctcggaaacaatccaagtagctagcagacgatgctgattcctcttctatacgaactgtctcttggatctcaataagccagctatcaatgcttccgcccgtctggaatcgttcgagggactttttcgcctctgtatgcttgcccctttggacataccaatacggggattcagggcagaaccacacgccagcaagaaggatcgccgggaaaatccactgaaaagaaaaggggattctgtaggcaaaactgtctgatcgcccaccgaaagccttgatgaggcagttcccgaggagctggccgacaacaacaaagagattgaccatggcaatggtgatgccgcgaagcacgacaggacaggcctcggaacagtaggcacacgcggtgacaaggaacatgccgagtgcgatgccgttgatcaattttccagcaagcagaacaccccgagtgaacgcaaagaactgcaagaagacggagccactggagatgacacatgcgatggtcaaagtcatctttcgacctgcgtaaggcgagatagggccgcagagcagacttccaatcattccaccaactgtggcgatcatattgaaagcagcttgccattccgccgggaggatagtcgtgccatcagcctgggtgtatccaaacaccgcgcggaactcgggagcagcaagaaggcctccgctgacctgcatgtcgtaaccccaaagaacagcagagaagcagaagaacagactgaacagtagagaattccggtaattggtaagggccaccttcaagctcataacagatccggagactccatcagggtgctcagactgcttcatataggtgggatccatcgtcactggagtagcctccaagtggacaatttcaccagatttgtcttgatcaagacccatagtggaaaaggggggaaaaggacaagagtgtccgagggattttaaaggaaattcgatcaagaaaactaagaaaatcctgctgctgttaggtggggaatttcgtagatttaatacttcaagcttctcataccatgtgcctactacctccgcattcttctgggccagcctcggggtacagattctcggccccgggtcatattaagatctggggaagttggctgccaagttcgctttgccgaaggacgagttgagacactaacgtgttccccgatacacccgtcgagatccacatgtacacgtgataggatggagattggacatcttcactttttgtgggaaactgaaaccttcgaaattcccaaaatctcctacggctccgatttccccggcgccgttacccccagaggcttctattggttagtgaatatccactctctccgcgaaattaactccacacctcaccggctccgatagacccgcgacaacaggtgataattgcatgccgagtcctgcactacacgccgacaagtcatccaacccccgttaggtccataaaatatgcacaataatcccacttgtggtgcttctcaagctccgacgtcatctagtccaacactctggtataaaggacgcggagtaccagagctggcccaaactccctagtcgatccaagagtccgaattcattcccttcaagttcgcattttaccattatgggctctccgcagaccgaagagctggccatgcaggccgatcccaaatgccctgacttcatgaaccccgcggtttttcgcagaaataccctccccgcgcgttcttatcatattccctctacatctctacttctcaatggagtctgggaattcaatatgtcccagtcaccaccggaggctcccgagcctaacgagaaggcttctgatggggactggtctagcatcaacgtcccaggtcactggcagttgcagggttggggaaagccaaattataccaacacacaattccccatcccagtgtgtcctcctttcgtacccaccgagaaccccacgggcacataccgtcggaagttccaagtgccggccgagtggcaggccaacaaaccagaggtccgtttgcgattcgacggcgtcgatagcgcgtaccacgtttgggtgaataagtccctggtcgggtacgcgcagggtagcagaaacccctctgaatttgacgtcacaccatttttgcaggaaggtgacaatgaagtctttgtgcgggtgtaccagtggtcagacgctacgtatatcgaagatcaggatcagtggtggctatctggtaaatttaattttcgatatgcgacagtgtgaaaggatcatctgctaatatatctcatggtaatagggattttccgggacatcactttgattgcgctcccaaccaacgatcgtttgaatgactggttcattcgcacagatctcgatgcagaatacgaaaatgcgacgcttctcgcaacaattgactatcaagtctcggagaaaagcactattacactcaatttaattgagacggtagagagcaacagccatgtcattgcttctacagagtgcaccgtggagccaacaaaatccgcagttgaactcagcttgcctgttgccaaccccaagaaatggactgccgagcagccgtatctgtacgaagtggagatgctcctgaaaactcctagatccgacgagacgttcaaaactactcagcgcactggtttccgcaaagttgagcggaagggtggtctcattaccgtcaacggaaaggctattcagcttcgtggagtcaaccgacacgatcaccacccccttttgggtcgtgccgtgccggtggaatttatgaggaaagatctgcttctcatgaaagctcacaacgtcaatgcccttcgctgcagccactatccccctgaccctcggcttcttgatatggctgatgagctgggcttctgggttatcgatgaagccgatcttgaatgccatggcttctatgacgccgtctcacgcccaatggacatggacgaaactcttggatacgaggagcgcaaggcaatgactttccccaagtgtggtacacatacgtcagacaatcctacctggcgggcagcctacgttgatcgagttcattctctgatacagcgagacaagaaccatgctagtattatcatctggtctatggggaatgaggcttttttcggtacatgtcaacgctctatggtagagtatgcccgggccttcgacagtacacgcttggtccactacgagggcgacattcatgcggaaactacagacatgttcagctacatgtacccggagatcagccggctgcggtctttggcagccactgagggtgtctcgaacaatggcaagttcgacaaacctatcattctatgtgagtacgctcatgccatgggtaacggacccggcctgcttacggagtacgagaaatgcttcgatgagatcccgcgtttgcagggtggtttcatctgggaatgggccaaccacgggttgtacgttgaaggaaacaaccagaaagacggcttttatgcctatggtggtgacttcgacgactatccgaatgatggaacgtttgtgatggatggtctcttgaacagcgcccaccagcctctgccaggtctgttggagctgaagagagcctttgaaccagtcaagttggaagtcagtggacaggctttggctctaaagaaccggtacaacttctcggatctaagccatcttcaagcttcatacaagcttgagtcgtttgacaaagagtgagtctaactatcatctcaattgacccaaggcaagctaaccttcctacctagagcaaaaaccttggaaaccggaccgctggagctgcccattctacacgccggccaaactgctgagattcctctcccgacagatctcttccaacacaaagtccacccggcctatctgactattacagttgagcaacgaggaaaggttgaatgggatcagggggcctttgtcgttgcttggacccaacagctggtatcaaagccaaccgagaaaatcccagtcagcttgagctctgctcaggatgctatctcgaccaactccaccaagacaactgtggctgtcagcggagccaactggtcctttgagtttgaccgcattcggggacatctcaggaagtggacatacaactcgacgtctattcttgagccgcatcccgacacagggcttgccatggtacctggtttctggcgtcctccgacagacaacgacgtaccttctgcggcgccctattcgaagcgattcggagtgaacaatctcacaaaccagttccgttcattcaacatgttttcgatggagaatgaaggtgtttgtatcgaaaccgagacgttcctctcgcctccagttctttcctggggatggaaatgtctcgcgcgttacaccatcactcccaacgggtcgttgtcaattaccataagcttgcaaccgactggagctgcaccggcaactgttcctcgtgtcggtatgaatcttcgcgcaaactctaatttgcagtcagcacgctggctcggacttggtcctggagaatcctatccggacaagaaggctgcccagaagtttggtttgtggaatgttgatgacatcgcgtcactacagacggtttatgacattccacaggagaatggaaaccgcactgacactgcttgggtggagcttctcactaagaacggcataggcttccgcgcaagcccgcaacaaagtacagtggtcaacggaggaacggcaagcttgaactggacagctagtcaatactccgataagactattgaggcggcacaacacccttgtgatctggtcaaagatgacgcggtgtttttgagattggatgaccaagttgcaggcgtgggaactgcagcctgtggcccagggcctatggatgagcatctggttaaggtgcaggatatcacctttggtatgctgttagagcctgtttctttgtgaagacttaatgatcggattttagtttgctaaataagctgcaatcccatatatactgctaatatcattccctgataacctttcaacccgacccgctggtcaaatctacatcttatgtagtccacatctatagaaccattttagtgcacgcgcccggtttcgcaacactcaggcgggttttcataaactacccatgactagtatcattcaaataccccaaatccacactttgattcatcacttccatgtaaatatggttaattagatatgcgaaaccgaaattatctgccgaaatgggtgaatcacgtgcacgcccgcgttaacgtcgtccgaagttcatgtcgaccttcccacccgtgtccttgctgctggcgccattaattcgttcatttgctgcccatacaagctcattatcgaagttggtcaaggaacttctttgctaggggaaatctcctcaatatcagtatcctggctcgaaatgaagagattcagggcggctcgagcggtccgtctcattctccctcggctagcaagttggttcgaacatccaaactaaaccacctcacagtgcgactcatgccgccatcgcaagacgaggctagtgatgccacaccttgttttgtagtgcttggcgattgacagactcgacaggtgtgatgctcgggatccatgtggaccctgtgtgagcctgaaccaaacatgtctatacggaacagaagctacttcgtaagtgggttgacgccatttcgaaaatcagcgactgacccaaatcaggagaggcaaaagtgaaatgattttggatacggtcttgcgaatggaagcttctattgaagaacttaaggggatggtcgtacgtatggagtcgccaaaggtcatgtcttacttgctgatgataaaatccaggctacggattccaattcaagggcgatgaatggtatccaggccaactcaacgtcccctggttcaacaattacaccggtacctcaggattcacgccatcatccaggtcggtggacaactagggaccccacggaaagtgcagtgctttcgtcagggcatctctcttcggcagagtctcttttgaggtggtcagttttccgtgatcatccttcaatattagaggaggcagaatcatcgtttttgtcgctcgaatatggacggccgtcctttcaaagcaaactatatggcatatttcccagcgtgggcttgtcagaggtcaaagatatggtaggtatattccaacggacatataacttttggttcccgacaattagcttggacgatctgaaatcgttgcagttgaggatatggcaggagaacctggagcctagctgccaatcgtgtctcgcattattagtcatggcgttgggctgcgtcggcgcttccgtgacagaccaagaagacagttgtgaaagcaggtctgagcagctgaagctgcaaggagcgtcatggttcactgccgcaatgaagatgcttcacttggcccacattgagatgaatgtcgaagcatgtcaatgtctcttgctgactgggtatgccaacattgctgccggctgaaacggcgagtcaagacaaagctgacgaatatttagactctacttctcatttttacaaaggccgctgcaaacatggtcttatgtgaacagcgcggcgactcgttgtcgtttcctgctctcttgcccctttgacaatcctgagcgcgacgatcgagaacgcatcaccagaatattctggtcttgctttgtactagaaaggtaaggacgggcaatgaaacgttacaattattgcagtctgactggccctagcaattatatttcagaattgccatcccttccgcaaaactgcaatgctgagatcgaatcaatattttcactcccgggcaaattccactcgcatgaagctattgaagaggaagaaaagtcgacattctactttctcgcatcgatagcactccgaaggctcctcaaccgagcccactacatgctgtatgaccgcgacattggtcttcaaattgattccaataattttccatctgtgaaccaagagctggcgcgccagctgcaagattggtatcaaacactacctccgagtctccaatttcccgatgatggaaaacccgcagatgatccgcatagcgagtatttgagacagtggtatctcagttgtcgaagtgtcatctatcgaccttatctagaatgggctctctctaatccactgtgggacctcaacaacaacctgcgtgtactcgatggttgccgggttgctctcgacacttgcctattcaaattgaggtatctgaagcaggtgccgtataccgtcatggtggatacatggccatgctcactttcgtatgtctcatccaggcctctgggctgtggtacattattactgatataagaaatactcttattaggctcgaaacggcaatgttgactctcatgggcggcttctgtcatccacagctcacaatgcagcttcgccatattgccttactagaactagggcctcacctggagcagcttttacaacaatggatgacggtccatggatcctccgtttctcctggtgtcgagaaggccctgagattgatcatgaaagctcacgagttctttgagagcagaagtgccgactttgctccttctcagggtgaagaacaacgtctctctccaggatcccttcgaaagaacaagggttgagtacacattgatgaaaagaatcgcctttctgcgtgatcgccgatgaatacgtctagtcaagactttcacgattattacctggtaggacccagcaacagaatcccattgtacctccctaataaaaataaagggcaagtcataaaccaagcctccctccaactgtatcaacccagtatctaaattgggcttattatagcttcaggagaaaccgcccacgcgtgcagtctatctatggtctaattgtccactgatcatccaacaaaaacaccgaaatacgcacctacatacattgataatggccagtaggcacatattagcataaagatcgcatcttggaagatcacgccagcatatatgggttgaaattcgagatcagatggtattgcatctactatacttaaatcgtgacgcattccgagtataatcgagtattctatctatccagaagagcaatagtctgaaggatacgcgtctggttatggtataatgcgtccaaaagccttaatagcatcttacttgagagatattcgaagtcacgttccgtctcaccttccatatttagctctcgcgtagcccccagtttctcacaactctcttctctctataatacgttgaccatatccatgccttgtcttttatattgacattctcaacatgacgtctactcgcagaggccttggtctagatggaactgcctcggtccttggggagggataccccgaagactcaggaaagcaaggccccgagaagcgtgtcagttgtcaagatcaaccacctgaagccgaaacaaccccggccgatgtactggatctacaccccgcaatgaccgaggagatgatcaacatattccgacggaagggaaggtactaccaaacctggatcaattaccccgaggactccaactgccaaaggccatgtatcgtctcgccatccacaataaagatggaacagctgatccacccctccgatgagaggtatcgatgggacgagtactgcaatgaatgggttggtgcaccagaggaaatcggcgatcctggtccactcaatctccccgttggactggattaccacaagctacatcttcgcaaacttggagtcgagaaagatgggtttgtgggttggaataaataccacggtcgtgtggcacacactgctatcttcgctgacaacaatgtcagacttgatggtcctcaatggtcgcaaattgctcaggctcactacgaggctttctttgatatcgagtctctgaagtacgtctttcgcatgaccgtcgtcaacgaggacacacatgcctttgtggtcaaggtgctatatccgagatatgggcttgagcttgcgggagatagccaactgaggacttggctgtacgatactgatgattatcaggagattatggggacaccgttggggaaagctgtcggtgctcttgtcttgggtgcttttcctaggggtacgcgtcgcattctccaaattcatacttggcagtatgatggagacctgcagatgcgatttgatatttccgatagtcttcaataacctggaatgcatcctgagatttgtgaagtactgcagttggcgtatgtgtaagaagacattagtagtatccgcgagttgatgatgcagcaaaagctctgatcatattcagggctgtatacgaaatttgttgatcgatcagggaccactattccgttaacatagagagactacctaattccatggtgactgatctgttcttctattggtaactcggtggtgtaccttggtagagccctccgtatcctaattgggaaagggcaagaaaagaaaagtggtaacccaggcatcgcctctagattattgctacccataaggggatcaaaataatagttggaaacttttggatcatgaacttctaagcggactcatacagctaatgaaagtagctaattccgctttgatctcggaagctgtaaggcctacctagttgcgtgagcaaaactgtaggcaaggacacaactaaggatcgataaaatgtgaagaaaaaaagatatagcatgtcctggtttcgatccagggtctaggtattgttagtttgatgtttttatggataaatggcgtgggaaccttgacttacctccgggtcatgagcccgacgctccacctgctgagctaacatgctgcttggttggaaaaactattcctttgctagtttaaataaaaacatattagctttatgaattgccctttgaggccattcctaggtctctaggatggtgtggctggcttgggaccgatttatacaaagccagatgtgtggtttatgttagctatcatggtttgggtcggggtcgaacaggatctagctaactagcctagtgtgagtatatacatgagtactagttgtcaggctagtccctgttattttccattagttaggcgagtagtacgagaggactatcttgagactatacaggttgcgtctacatagtatcggtctactgactatactgagacatatagattcattccaggtatgtcaagaattactgtcattgccactcaagcagatgagagactttgttcatagagcactcgccatgacgctgaccgtacgtttcggtgtcatcatcatcaaattctcaaaggcgaagaaattctggaaggaagcgaatagaccaagcaggggtaattagagtcagtatattggacgcacttttctcccagtttaactaggcaaacaaaaaggcaaacaaagataccttacagtaggaggttggcagttgtttcttagggccaactatgtggagcattacccacactggcggtccgtcccgtgtagtttatcgtccacgggtgttacctaggtacgcacatggtactacctaggtaagtattggggctctattgatgtttaaggagacttgcgaaaaatacagtcagctttgaattaacacctcgattggaattgcggctagcgcgcttggggcgagggggccacaaagagaacagagtcagcacagcccgcgctaaaagagcactggggcctaatcctcctatcctccatccttcggttctcttttcatcccataatctgttccaacgtcaaagtttccttccgaatccactcttttgacgaaattctccagtgttacctagtttccgcactgccagtatgcgaccgtccctctatcttctgagcctcctcggagccacgacgactgcttttactgcgaatattcgtacaaagaactccgatgtcgtgtctttgacccaggagacattccatggtttcatggaggagcatgacttggtcttggctaatttctacgcgccgtggtgtcgtcactccagaaacttggcccctaagtttgagcaagcggctacggagctgaaaaatgacaacatccctctggtcaagatcgactgcacacgggaggaaagactctgttcggactttgctattggtgcatatcctactttgaatgtgttccgagggcccgagtcgcatgagccataccatggctctcgtcgagcagaatcgtaagtaacccgctaactggaatagcacctttcaggcatgctaacatgctggccaggattatctcatacatgatagacgagtcgatttacactggggctgggggaggcttgtatcttcaagcctatgattgaaatagtcccatggactgaacgtggtttatcaagcttctggtttacttttcgacatacagtttgggaccaggtacatctggcaattgtggctcagactatgacttatggattttagatgaagctgcatatggataaaaatatacaacattctggtttctactttttgctttaaggtctcggatagccaaatacaccacatcgcgtttctactccttgtatattaggcaaatcttaggccctatgtcctacacatcgtattttatctatatcgaacttagttaaatatagatattgtgacaagaagcttctctattggtacaaagacatccagatctgtatcgttggcttctgggtagcgcgagcaggcatcagtccacatatcagagtaaagaaagtgtgtatattctagctggctacgccgtacgttcacgaaaacccagaaaacgagagagttgaagcaagctcaaagacaccttcatccttcctggcgtgttccttgaccaattcctctctcagctcgagggcctcgcccagatccatttgtgtcgcagactcagcgccatcgcctcctgtccaaccagtctgctgaggtgggacgttccacgtagagcaaagccggtaggtcggatcgacaagagacacagtgagaaaacggcagtggccgggcttggtcttgtcctgaagctgtaatgggcccattcggcgctggaaggcgttggggtacgagatcagccggcccggaggcatcttcacctcgccgagctgttgccaggctggactatcctgaatgtcctcaaatccgcaaagcctccctatatacttgacatcccatagggcatacttcaggattaggtcatcgatttcatctgcaggacggtcctcgttgtccgaatcgtcggcaccgattcggtcgtagacccaggtacggggccctagtctacacctctgccggaagctgatttgcggctcgggcatgttttccgaatcaagcgcgtagatggcgttggcgactatactttcgtttgcatttccttcggtgtgccactcctcgccggggaaggatggcgtctcaggatctagctcgatgctgtggatccggacgacagtctggagaccccggtctcgaaactcatcctgcaatgcaagcgtgtagaactggtgatcgtcagggtcctcttcttttggtttatacatccattcgtagggtgtcaaccaaggatttgctccaaagaatttagacagttcataatccggactgcaaacgtaatcgaagtgcgctgggccaacgattgattttccagtcctccctgctttccagtcctcgtacgagtacgcagttcccgggcccgagtgctcaaagacaaatgtgcatccatacttggtcaaagctgtgcgaagcaacccccagcgggccttccaatcctccgggatcctttgcgttctgacctgatcccagtataccttatcccttgattcaggttcctgaaggtacgcctccacttgagcacacatggcttcgtattcctccgcagagagtttatcctcgttttccttgtcgggcaattttttcgcccattcagggaactgggctttccactcgactccgtaagtgcggattcgtatgggcccacgaggccaggagacgcaattcccgtggaaaaggccaatcgctttcctccacttgttacgaaccaaaacctcgttccattgcttgatgctaccggagataacggtctcgattgcggagtacatctcgtggtttgtcggatggagattgttgatgtaagacgaaattcgaacatccgtagacccaggaggaccagtgaattccacttcacacggcagccactgaaacttcgaggaccaaatggaccgaccgccggccgctgaccagtttgagcccccttttaccatttgtgggagttccgaaacgattgagccctctttactgcgtgacgaccaagaatcctcgtccattccacacgattgccctccgaccagggttctcgttctcccatagacaagaggaaacaaagatgggccgacgaggtttaccacagctgacgctggcttctgccgaatggcttgatgagataacaggccgacaaaattcgacagctgtgacttcatgtcggaagatattgccacatcggatttacaaacaccgctgctcgtgttgaagacgaccaaacggccgtctcggtcaaactgtcgagccttgtcttgcaactcgtgcaagcaccagtcccacgttttgtcattgatcagcgacgacgatgcaacggcgtcttcccgccattgagcggtaacttgctgatcaaagatggcgcggtgccaatccggtcggtcggtgatggtgtttattagatctaggatggccagttctttgaccgtgagaatgtgaccataccagtcatttacccctgtggcgaattgatcgtgggagagtaacacattgatgggaagatcatggagaccggggactttgagggttgttttattatccaagggagtttcaatgatcccggccattgcttcagtgaagtggtgagatactggaatgaagaagatggaagaaggctacttgtaaaaatataagaaagaataagatggtagcctccagcagacccgcccggcatacagaatatgtgactccttagggtgggaccgcagaagcataatagcaaacctggacctcgtatcaacctataactaactaggagagagttcctggactagcagcgtcgccgcattccctcataaggtcttcctccgttggaggtgacattccgtgtaactactaaccaagtagcctaccaaacggtgcctcgcccagattttatctaaactaggaaagtgacgaatagtaaacaagccaattcgaactattgtagagctagagggcgcgatgaccaatgccaagtcgatgccaagacagctaagcttaggtcaagcctacctaggtagagatctatagaggcttctggacagttgttggaacttctcggctggaatttacctaggtagccaagcatggtaactacgagtgtttggattggggacggggaaatatggcaaaaatacggcaaaaatacggcaagaatatggcaaccttggaagaatatgcactttgtttctcggcttgtacccgaacgctaatccatatatggctagttcaaaactaaccccagcttagctgtatcgctccgcgtcaaatgagtcattgttaattaccgtacggagtacacgcctgtcacaacggcaaatctagcgactatatttatccggaaggtcttccccatggctctttcctacaatcgccatcagggaaagcaaaaccagatcgtagatgcgtagaatagtagaccctgtacaacacctcctaaaccaccaattctcttcaaaatgccagccacagaagtccccaaggctgtcgtcaagttgctgcatggaatcaaatcttttggccgattaaaatgacagaatctggcaagccgctttttgtttgtcattcttgttctgctggactatgaccatcacgtttacagaactggtccgggttatggctggaaggtaaagtgcacggaaagttactacgtgtggggtgacgaatccgatgaagggcttgagctagaaagctctggagatatctgtcttcttcaaagataccgatactctacattcgccaacagagacactccacccccgtaccccaccgacctaaaggggctattgcagacagaagttgcacttcgagagaatactcaacgcgagatagccttgaaagagaaaatagaggaactcgccaaggaagacacctacgcgactgtcgttcaagacttacaggaggaactgtcgacactatcgaaggaatattggaccttagaacgacgttggtgggagattaggtcttcgtattgcgacggtccgctggccagaggtatcgaattctggcgttcacagccaaaatggtatatgcatcgagtacttgtggaagattgcgttgggagaggaggctgttgtggcagagactgtggatgctgttctcatcgccagtcagaacggaaatttgcagttggtcattgcaccgtggagtgttcttgttgcgagagagcccgggggtttgcactcgaccctgagcagaaatcccaactccgcgagaccttcaaacttgattgcaaccgtccgcgtgcatggtattatgatcgaatgaggaccgcttctctgctggggttgatggccggtaattatgaaaaccctttgaatctcatcgttgacgtgccgccaagatatacagctccctctgaggaatcgcaagggagcaagtggaaaaactatttgcggggatcttcacgctaacgtttccaagagtaagagccggtcaactgcttcagaaagttatatttgctgttactgttcccatttttgtgtcgctgttatactaaaggacgaggtatccagggatatagtggtactaagagagaatggagaaaagatatatatacctgtcatcattgctctacctggctagcccttcgcataggttcttctctccccgtatattcccagcaccacggacccgacgatcaagaccctgcaataccttacacctcacactctctgagttaccactgcgaatgatgtaccttgtcgtttttcgctcctgatatggttactgtgctggagttcattaactagggatccatctttagataccataccacacttttttcaacccttcgcatacaattggatcatgtatttaatatcgtaatgtcattgagggaatatgaagctactgtggggaccattcgagtgagggattacatgtattgatattatgaagaaaagccagtacattttgaattaaattttaaacacatatcgcgatttagatgggaagaatattctacgcaaagatactttatagttagccagtctctcgacaggggttagcaagaccatatgccgctgcacatgtttatcgccggttgaagttcaagaagcgagactgtatcaaaatcaatcagcatcgcaatcacaaagatagaaacaaggtggagaatatctgcacttaccgccaggaacaaaataatcaggttggacacaataaacgcagcaaagatacccagatcccgccatctgttatcaaaggacatattgaaggccgcgtagaactgctctccaaccttgaacgcacagtacttgcaagcttgcgctgcatcgtcgacaatatatccattaccaccgcggtcaaagaacggcttcatgtactcgccacaggtgagattgtccggggcattgaaaagattcagctccgactctgcgcaaaccacgtcccgaccctgcagttctgtcacgaccattccgccgatcagacgagtgaatgggtcgaggtcgtacagccatgcgcgccagaagcctggcatctgaggcttggggattgcaacgccacagaatagagagaagataatcacgatcggtgggttgagctgagaagcgatgaagctgttcggggtcagagctgagatcatctggcccagagtcacggagaacatttctgtaatgaggattatgaggaattggtagccggcgcggttggattcggtctggaagcctgggatgtagtacaaggggaggaagaagcagacggcgcacaggacactgtaggggatttcggcgacaaccattgacagtgcgaaggcaaactggctgtaggtttttgatgctgattcgcggtagaagattagacgtgccatatcgtaccgcggttgaaccatctggagaatgatggctgggaggacggtgacgttgaaaatgacgaaaatgcggtattgcagcgaggatcgagagtcgtcgagttttaagaatacgagacccgtgataatggagatcacaacatgagtgtaaagcctggtgaaaccgtagttccttgagcgccagaatgatagatgtgttcgccgaccgactaccttgatttggtgccagagaggtgaagcgtactccctatccaccttgttctcatcatgattgtcgcgaacggcctgggcacgactttgcttgatctggatgatctcctgtttgacttgttccagctcaggagaagtgcgccaaatgtcaccccagtcacggtctccaatccgacgtgtttggccagcgccgatggcatcaagcatccactcagccacattagcatcctcgggacagtgggctccattacgactgaagtaatccagcaggacctgggaatcatggccaatgtcaccgtggtaaatgcattcacctcctctttggagtaggagcagacgatcgaagctttcgaagagggcggcattcggttgatgaattgtgcagagaatagcctggcctgctgctgctagcttccgaaggaaacgaacaatgttccaggcagattgaccgtccagaccagaggtaggctcgtccaaaaatagaagcagctcaggcttcgccgccagttcgacgccgattgtgacccgctttctttcttcgaccgagagaccggtttcaggtgtaccgataatcgcatctgccaggttctccagttccaagagagtcaggatctcttccacgtaagcgtacttttccgattggggtgtctcgaatggctggcgcagatccgcagagaaacgcaacgcttctcgcacagtctgcatgtcctcgtggacatcaagttgctccgcgtaagatgtacctctttggaacgaggtgcctgggggcttgccatcgaccaggatgtcgccggtaaccacaccaatgttctttctggctgccaaaacgtccagcaatgttgtctttcctgcgccggatgctcccatgagtgcggtcaactttccaggctgaacatagccgtaaacggagttcagaagacgtcgggtgccggatggcacaggcacttcgtaagagacattctcccaggtgaacacagacttggaggtaatattgaggtttgatcctgcgtcagtctccaaggtctttgcctgtctgcttgctttcttcttcatcaaagactcatttagctctttccgctcggcgttttctttctggtagaaagtgatggttttgccgcctgcaccgaattgacgtgtctctccaaaatacaaattcgaacccaggaaaccaacaatcagcgcaatcatgatgccgaagtttcgccaaagatcgccattaaggtagctgaaggtttgcgcaaggtacttggagcctgagatgatggcggacccagggtcacctcctgctagagtacaagcctggtgcgcaatgtcggtataaccaggtccagttggcacgagtgagtctttcgtacatgtcaaagtaaggtgcctaaactcgttcaccatcaaggaagcgaatccaaggccgaaggggttgatgaagtaaatccatcgcagccacacctgagcgccagaccactggataagatatccggacgtcaaaacgaagaaggtgataatgacggatgcgaacttgatggcgtagtcgaaatcaggacataggcatccaacagttcggaagaacactgtcatggtaacatagccctcgaggataatcaagacaaatataaagaacgcgccagcatccagaaccagtccgcacatgaagtagacgatgatactgaatacgagaattcttgcgatggcaaacgcagtgtccacaataatctgcgcaataaatagtgcgctaggtctgtagaacgtgaatgagcggtgcttgttaacaactgcgcggcccatcattgtggctgcaagttcggagaatgcttggaagccgttgaacagcagactgatgaacaaaagacctcctcgagtaaaggcaccggcactcgtcttgggttgatcaagccatacagtacccaagatgatggcaataccaacagaggtaacccatgagacggtcaatgcaaacttgtcctgccatttgaggaggaactgtcgttgcatcaaagcccaggtttgcaggtggaaagggattgagtatacagatgatttggaagtaaacttgcgctttgcctctttgttggcgatctcaaagtcatcgtagattttctgttccttccgaatctgctcgcggtaagatttcatttcctggtctagcgtttcactgaagaccgatttgtcaaaggcttcgactagtgcttgcggcgtggagggcacatcgtcggcacttcttccatctttgaactccctctcgaaggggtcagtgcatcctgtcaagtagtcgggggtggtccgacgaggcttttcgcggaacccaaggtcttcgaaatatgaccgtgcttcggaagtaggaccaaagaatacttggcggccgttgtcaatcacgaggaccttgtcgaactgcttatagatattttcggacgcctgatatagtgagacgaaggttgttgtcttgtatatattggtcagaatccgcagggacttggcgaagtcgagggcagttgaggcatccagaccgcgagtgctgttatcccaagctaatacagtcgcagaggtgatcatcatctctgcaatcgacacacgacgccgctcacctatgctaattagactctgttcccatggagctgctgcacatataaaacattccgcttacctccagagacaccacgaataaactggttgccaatcacagtgttggcagtgtgctcaatgttgaacatcttcagaagcaagttggtcactttctctttgaactcggctttcgacacaccaagtgggcgctttccgggggttttggtgtcgagcgcgaatccaagggtttgtttcacagtcaaagtaggctggtgaacatcatcctcttgattgtatacggcttctccacggaatcttttggcgaacgaatccgagtcaaaacgaccataaaggacctcaccgtccaccccggtgtatccaaaccgctggttcgcgatcactttgaggaatgtcgtacaacctgatccgggccggccaaggaccaagaccatctcaccgggacgtgtgagaccccggaaaccctctaggatgttgtactcttggccttgctttctccaaccgaagaggtcaatgagtgttcctggtagattgaggaaatcgacgattgcatctgggaaggttttgatatatgtcttgacgccgcccattccagggactgtcaggttgtcccaaatcacacctaggacagtcagtacttgtttttttttttttttttctctctctcaatgtgagggtctaccaaccaatatgcttgtctttgataccagcttcttcggaggcggcacgatcgccgcggagagttgtctccagatcccatgtgtcatcggatgcagtagaaccctcggccttctcgatatctttactggtgactcccttagatacccgtgactcttgtctggataatctctgggcttggtgcgagatgctggagaattgtttgctcagctccgagaagtccttctcggcggtcgtaacatcgacacccgtctggaacgtatccgccggtgtgttggcgatgcgaatttcttccagctggcgtccatagctgtttgaatccagggtgtccacatctgatttgctgctggtttccgccatggccagcttgtggtccgactcgatgtttgccattggagatcttaaggtgcgggagagttaagttgtgccgagggccgatcccatataaactctccggcacgtccacgctcccccaagagtgtgttgaattattggattatatcccggggaggtccaaaacaaaataagagaggtaagatcctatcaacgtttgaagcccctgaaacagagcgtttaaagaaggagggggaaaaaagaagctagaagaaaacaaagaagctaagcccgaatggtccttggtataagtcgggtagtatctcaatggccagccctctaaatttttcagggatggtgaaaatagcggtcttagatattttacttaggtagctttcagaagaaaattgtgtccaagcagaatcttccaaagcccaaacaaatgtgggggcaaacctccagggacggcatattccgcggtggagtgaccagatttgaagatgccaagcagacgggcacctaaacggggttaaagcgtaaaaacccagtcaacatgactcgcgatgactcgttactcgtgatcactctgcagctatgattataaattcaatcgcattttgcagaagatcttgttctagagcaaagggttcggagcgtttatcgatctagggttgtggagagccaattagtgtcctccactttacggagtagaggcaaggacaatataactgaacatggatagaccctgaaccgttcatcgatgttgggaaaactggctttcaatatcgtggttatgatccatttatagagaatacgaatcaactgcatgctctccctacgcataggcttgtacagagtatgtacattgcagtttggcatcagaacaatattttcgttaaggtatctatgttgtagatgcctagtgcgcatttgcatttaggcaacttagtaaccttgattcagaaatatcaaattgaggaattactgggccctttattctgtatcagcactcatctggttagccccgggatatcttcggccggcatatcttggtctgccatgtatgttgtagtgccgtaaaaggctaacatttcgagaaggtaacatacatatccttggaagcatcagtccacggagtaataaaccaactgatacattcgtggactgaacaccatgtcattattgggaaagcccgcgtgcaggacgtgcgccaccgtgcgtattcggagtttctagaccaatcaatgctctcaatatttccataaaattatccgtaaatatgtcgctccatatattctactatattttaagcggtcgcaatttccccagtggcgccgatttataggggtcccgctgagtatttcacagcatccctaggtaggatgacttccaccggatggcttggcccaagaaggaatagtgcaaccacgtgataggtgggtcactttttatcaatctatccatttattccttgatggatatctactccgtccacgggtactgagcccgcgataaagtacttggtcatatacgagacatgacgatgaatggacaggggttgccagttgcaagctgcaaatcgcacaattcgcgcagtgggccgcaccgagacaggtaatatcaatcgaagcactttacgcacaaatgccgcacagaagaaccaactggatggaatagaaaagaagaactgacatgtttccggcataaacgttggtttcaacaatttgactccagctctgctaagatatatatatatactaccaaacttatctatgtgcctatcccgctctccctctttcccttccatcaatccccgaaatctcaccttcgaatcaatgccggaccatcagtacaagttcaacgtccacatgggatgcagcggctgctccggggctatcaaggaagctgtggaaaccttgaccggtgagtcctagtgctgcttttatatccggttataattttcaggacactgacatcttcacttttgtacggtgtaggggtgaaggattcctctatttgccttgaagatcaaactgtattcgtggtggctgaaccttctctctcctacgaaaccgttttgggggctattaaggcgaagggcaagaacgtgcgcagcggggaggctgatggagttgctcagactgtttaaggccgttagaccatgtcagtcattgctggatgatatagtactccatcagttccaacttcatcggaattacgagcgatgaaaaacacgtccgtttagaccctgtcggagcaagtctgggcgtgcttctgagaagcgacaacatctacgttagcctacttatgaaaattaggctatttatgaagaagagcatttatggtctttacgtgcaccgtaatttttcatttgccgggcaaaattgtgccctgttgataatccttccagcatagagtcgatgcatactagtgttatggaaaaacaaaaagaaaaaagaaagaaagagatttcacatccttcacctagaaaccccgtcgtcggctcttaatgatgacagctgtgatgcccctcgccatcgacctttcccacccgattcacttgctcccaagccgacaaaccgacacagatcgcaatgcgccacagcattctaggactgagcccctcgcgccacacgccccatacaagagtcaaaatggaaatcgccagaaaagcgtttcgcagtttctcaatgccagcagtggccaccgaacccgcaaagagaaagtccaggacagtctagaaatttagcacacgcgttcaacagcctagtaacatggaaaataacatacgggcagccaacaacacgaggatgagagcaaggcagatccttccggtagatatttgacgactaattgcacgagtctttgtagaacggacccgtcatcgtggtctgggttagacttagacgagagtttgtctgagggtttgtctgaggtgcagtcgctgcatgacattttgaatatatgagaaaaatggcccgagagaaaatgaaatggagttttgaagcagtactatgggtctaggtccactggatagatatatgtctgcgcgattttcgcgtcgtccgagaatgcacccctgtacactatcgatattcccaatgcaaacatgtcaaacacaccaagagatcgttaaagttgggaggtgccatttgtctataacacagacttgtccaagcgatattctgaggattagagagcagaaaatccacggatgcaaacagtacatgtagacatgtgcccgtaaggcgaacttgcaaggtcagtaccccgcaatgcggccccgtcaactgccaataatagcctccaaggcgtttttgggggttccactctcaggtattagtgggcacagctctgcctctacctaggtattcgtaaacaagacaacttctctttcccaaccttcaagacgaaaatggccccactcaagatcgtgctagacggcagttcgtccaccacacgccagccggaacgagctgccctcagcttcgtcgtcaaggcaactgggaaaaaccgagaaagcgtgtccaaggaggtcaccgagacatctaacgagatcaaccggctttttaaagacctgtcgcccaaaacggagaccggcgaaacaatcaaaggctcaccagtgacctctttctcttccacctcgctacaaacatggtctcaagtaccgagcgataagtcgggcaagcctctacctactgtgtaccatgcgactctgtcgctcaatgcactcttccaggacttcaccaagcttaacgaagtcgttggggggttgttttcttaccccaacatcgagatccagtccctcgagtggtgtctcaccgaggtgacgcaaaaggctctgagttccgaatcccgtgaggaggcaatgcgcgacgccgtcaggaaagcaagcgactatgctagggtcattggacgagaagtcgttgcggtggaaataagggagtcggcgggtggagtacagtttggaatgaacactggacggtatagtgcatatgcccagcatcatctgatgatgcagcaaatacaggcacaacagcaacaacaggcggctgtctttccctctgcttccaacatgagctcggattcaggcgctcccatggcacttgatttgagtccgcagttgattcgctatacgaatcaagtgcaagtggaattccaggctgcagatagttgagacgttgccttggatattttgaaggtaatcttgcactggatatgctcttgcactaggtatgcttttgtgatttccaattgtactttccatagcttcatattatttttgaagggaattagaatgatattggcccgggtagatttagagctatactcgaagaatgtcgttgacaccagttttgagacgtcccgttcatacatcctagatactcgctaggtgcctgtatctaaccgtcccggcctctaggcctccggcccatgctctgtttcactcagtgatcaaaagacggcaagtggtagggcactaagaaaccatcccgcgcagcctgaagctcgctgcatatgtattaatgcctaagtcggtgtcgatccgggacgctcacagtgacccgtatctcgatgtgcgcatggtgtagcttcaattgatgcattcacttgcgtaggattaagtcaccgtttcaattcgtgattcgtgagttacactgattataccgacaaataaccatacagttccccaagtatacggggatcgattccaccactccgatattcccaaaggctaccgataaaccaagacaaagcgcaaagcgtctatgcagagatctccttaatctgcgcctcaagtttcttcatgtcgccgccaacaacgcggttgacttccttgccatccttgaacaccacaaaggtgggcatagcgttcacgcccagttcccgcgccacactttgcagcttgtccacgtccacctggatgaaacgaacgttttggtactgctcgctcagcttgccgacaacgggggcgacggccttgcagggtccacaccaggttgcgaagaagtcaacgacgacggggccggaggaggtgagggctttgaagatgacttggctgttgggcagatattagaatttaacttattgagcgctgaagcaagtacgacttacttgtcgatctcggtgacctttccgtgagacatggttgctgctgagctcgagttgcgtgacttaaagaagaggcggatagcttatgaggggttagtgtttggttgtttgtttctgctggaggtctttcaagggtgttttcgaaggttgagatggaaagtggtgcgtggaagtactcaccaatgtatatcgcagtgagaattaggacggtcttgagctccatcttcagttgtcgttcccaagatatttggtggagcgtcgtgttatttggcgtggcacgtgacctgacactatgccctaatgagaggcacgcgatcccgacatttgagggggaatgattggtctcaagtaggtctcatttgaaaatgtcttactgtgatcaagctaaacctgggtctcggggatctagtgagtttaatccgactgcagccaccaaaagcgtctaccaccggccggacaagtagtgtgtgatgatctggagacaaatccagatattttgtacatgccattcggacctgattgagagaggatattgatatatgtactatgtagtcggcaaagataacaagtaaataatatcaagaaagaaggcgtgccggagtatcttgaatgcaggtttcgccacggtgatacacccctacgataccctcaaggccggtgataaaggacttgtttctttcatatcggattcgtcaggagtgtgttttcattttttgagtatagcgcgctctagtttgtggtggttctgaagcgagatgaaccactatatcaaacgataatactcaaaaaacgatgctttgaaatatcgacttcatattgaatatatataacccgcctcccgattggtggacatcatatttcacattctttctgataatttgtgtgtacttttactctggaatgcagcatccaggagctctagctaagaattccataccttcatcgtcaatagtcatgacctgaacgcagctaacaaccccctcatttctcatactcaagacccgctggaaatgaatttgcagaatcaaaaatcgaaaatagagcccgagtccagctctaatgacacatgcgccagttccatcgtccagcccattaccacaagtaatgctccgagcacgaccggatcgatgttacgcctctccttatgggtctcgttttccgcatggatctcgaattttgacaatggctacgccggcacggtccttatcatgccttcttacaaacacgcatttggaagctgcgagcaagtcctagacccgaacacgtatgccaacatccagtattgctcattgacgccactgcaacaatcactcatcagcctcaacttcctgttcattgccatcggaggcgggattgcgggcgtgacaggtcaatacattggacgcaggggttcaatccaggctggatgcacattggctattatcggtgctgctggaatgcttggcaccagtggaagcttcttgcgctacatggtgtgcagatcgatcagtgctgtgggtcttggacagctaatggcagccagtgtcacgtatggctccgagtgcatcgtggccaacaagcgtgggctgtctttagggttgtataatgtcgggcttgctggggggaatgttgctgcttttgcggtgtgcgcgggttctgctcatctggagccgaccaacgactggcagtggaagacacccattctatgccaaatacccctgggagtgattctcggtgctgggatcctgatgctccctgagtctccacgctggctcatgggacatggccgagaggaagaggcgcggatctcgttcagcgtgctgtacaatcagagtccatattccccggagatcaccgcgcagattgatgatatcaggacaaaccttgcaaacgagcgtgaaagcctaaaatctgtttcgttctttgatatttatagtaggaagcatgtcggtcgcaccttgacatccgccatgatcatggttggaatcgccattactggtatccagtttgtgcaaccgtacgctacactatttctcaaaggagttggcatcagcgacccgtacctaatcaatgtcatcattggcttgtgcatcctaggaggatcgttttttggcccgttcattgtggaatacggcgggaggagagttgccatgctttcgggctacattgtcatggccgtctgtatgctaactctttcatctgtgagcactgctcttggaatggatgaaactgctgagatagtgacggttgttcttctgtgcttgtgggctttcgtgtttggtgggactattgctgctagtgctaacctgtcttctgtggagatgcatagcgtctcacttcgcacctttggccaagccaacacaacagtattctatggtatttttgcctttggtgcaacgttttggacgccctacatgttaggcgcggcctacggggacatgggtcccaatgtgggctatttctatgctggggtcaccgcggtcattgggattttgaccttcttgttcgtaccagaaacagctggggttacactggagcagattgatgagggcttcaattcgggaataaaggcatggaaaacatcactacccaagaataaggccatcgcttcccagaagcggaacatggcaggtggaaacgtcggagcttaaggaatgcgccgagccatgctcaaatagccgggatatcatatagataaatgtgcagactatggtatatagctaagcactactaggtactatcagtgaggctacctagtttcaaacttgcaacggaactcctcaaatgcatagatgatatggaacaatctacatggagtgcagggaagccaactatcaaacatgtcccctgaaccgcagttatgggatgacgtgtacaaaatctgtaggaaagatctttacaatacgttcagatttctggtctttttgcagcttcattgatcgcaagagcaccaggcacgtgacattctggccctaagggacgcacgcttttcgttctttcccaggacatttttcctacttcgaagaaacggcaagataaaaaatatctgatcagatttaagaagatgtataagtgactataatatggcttacaggtctgcaaaccaaaaccaaaatgcgtggtagttcacggcgttcggggcatggagaaagtgactggacatgcgcgccagtacattttcagttgaagttatatcaatcgaagataccttgttagtcgagccttctaaaacgatattttcttggcgttcaagaatggaaagagcgcttattcatgacagttgaactttgtagaatgagagtacctggcttcacctaccccgacataagcgttatgttatgttgactctgcgcgattgctatctcatttgtcccatcttcggaagcaaacgaaggctttaaattgatttctcttcttcctcttcttcctttctctctttcctctcacatccaccgcggacacttcttcagtcagataaacatacagttctatctggaagcaccaaccacagtgagttgaattcattcaacaggcaaaacacaatgatctgataacaatatcttcttcaagtctacaaagctcagtcaccacgctcatctttgcaattattcctctaccatgtcgttcttcaccaaccaccctcgtgccggccggcatgatgccgagcctgaacaacctcgagttccacgcactcaggtcgctgatttgcccaagccgactcaggtaacccttctgaacatccagaagctgaggccagactctagtcttacagtctggggcaatgaggtccttcatgccttgcgacctttcaagctcgatgcacttgtggacagtgatcttccgaagccccacccaagggacgacgaataccaaaaatggaagttctggacactcgctgtttcgcgctggctgtacaatcaggtggatgcctcgctccaactcaaagtgaaggagcacccaaacgagatcacctacgccgacgaaatgttcagcaccatcaggcggctgagtctgcccaaccagtcgaaattccttgcgcgtgagctgaggaagtgggaggaaatcaaacgtggtagcttcgccacggctgcagactttatcatggcctaccagaaccagttcaaccgcctgaagacagagaaccatgagccctcttgcgactttgcgcttgaccgactcttgaacgagctgcacggagaggtcttgaaggctccctacattcaagaggaggtgaaggatctgggacgccccgtcaactatcagatgttcgtctactactgcaaggtcatggtcaatgaatcccgcaaccccagcatcccggctgctgaggcttccactatgggaggtgacggagaagggcgaggccgaagccgtggacgggatatctcttaccgcagctggagacaaagcaccaaaggacgcggcccggcatgggagtaggtgctttgttgtggactagcccgacctcgcaactaatgaggtcgcgaaagatgggcaccacacctgcactgaatggattggagaattttgtgatgttgtggactggcccgaccttgcaactaatgaggtcgtgaaagatgggcaccacacctgcactgaacggattggagaattttgtgatactacgaaagaaaacccaaaaatccaaaaaaaaagggtcctggctacagtcctggcggcattcagacaggacatagcaatgagatccattgtctccctcatgattcccactccgtaaggtagcaataattagtatttcacgttccctattaggggatttgactagttaagactgcaagagtagaaaagcagaaactccaatctaggtaacgcgcttttgaaagtttgcctaattcaatttcgatgacttgcaggttaggatttagtcaaatatctctgaagtacatacacatacttgttgtggtagagaccccacatgtaggtctaggccctcaccctctggtagcatgtagatagttgtagtgggagctcgcttcctccctctccaatacaactctctcctttctgcttctctgaacctactagtgtagcttcaccaatactacttcatttgcgctatggaatatttgccttaagctatcgtaggagacggtgaagtttgtatcctttctgattatatatctctccctttttgtttcgtccaactagtggtattccgtctgccacaatacgggagagacatatcaaggcactaaggccaaaagaaaacagtcagaatgagagaaaataataaccccgttatcctcgagtatgcactgcggcccaattattgaatcggtcatggtggcttgcatggcagggaatccgatgtggaccacgtctgtttttaacgccccagcaacggcaaacaatcagcaaatactggcagggaaggtgacgctgaggaagccgggtacatggaaggtgctgggggtggtgtgctgctgacgctaagtccaatgcagacgaatacgaggctgaggctgataatgacgctaatgctcaggtgcccaactacgctgacaaagacgcgaatgagattctagagaaacgcttgtacccaaatatttttgacctcgatcaatctgacgataacgagaccccaaatatcaagatggttgaaaaagaacagaaagcgaaatcggtcggacctacaataactttcgtgacgatcaagccaaaattggagtcaaataccaagccaaagccggaggcaaaaagcaagtcggacgcgaagacgaagagcaagccagagacgaaaagtcaagcaaaactggactcaaagcccaagctaagatcagacgcaaagcccaagccaacgcaagaggcgaagaccaaatcagagacgaagagcaaagcaaaaccggacgcaaagccaaggccacaaccgccaaagatcacaactagacgggtggcgaagaccaatgcaaagcaagaagtgaagactaagccaaagccagagacaaaagacaagtcagatacaaagacgaagagcaagccagatccgaaaaccaaaccggagacaaagacaaaggcaaagccagaaacgaagacaaaaatcgagccgaagaccaatccaaagaaaagaatgataatcaatctggagacgataacgaagatccagctgggagcctaaaaagcccaggcacgaataactgcaacagagcggaggaagatgagccggtccctgtctatacccttgtcttgacccctttatttgcgaagtactggagaagctgctcgccttcacattttcaactacaaccaacgcccacatgaagctaacagacctcaacgacgtgcccgatgagacgaggatcaaggatatctgccagagaacacagaccacgagaacggttcgctgaagccaacaagactgactgcccctacaaaggaaggtggtgttaaatgattaaattatggagcaacttggtaggggtagagaggacacattttatagtcttctcgtctcctattacttatgtgctcggcttggtataatttgttgaagggcacatgtgcatcttgatttggtgtctattgaaatctatacttttgttttcactactatttgtaatgaccaccttgatatcattttggataacctagaacgacgagttagggctatattgacataagtgatgttgagccaaggaatattagctgcctactaactaggtaatgatagaatcctccacagggtatcaacacctataggagtcacgcgtgcgtatcaatagaagctagagcaaaaaaaaaaaaagcttacaactagtttggaggacgcacttggaacagaaccaatagttctgcattcgcctgtaggacggcttgagagccatgcaggttcgtctacggagtacgtgagcacattgtgctgtcactgtatctactccgtgtactccgactagtgcgaattgctggggtgttgagaattgctggagtgttggggattcggcgaacgcgcgcgacgcgttccaactcacacgtggataaagtttacgcccctattccatgcatccatcacattcttattaagccctaattatctcgatctgttcacaatctgctttggtctttcagtttcctagtcagaatctttttatctttggcgtaaatttgctaccgacatatgtatgtagggtaggtatattaactactatataacaactgtgttaaagcctactccgtacgcatgctgcaaatgccagactggaatgtgcccaggcccccctaagccctaaacaggaacccttggtgggttctgtgatgaactagtgaccgatagcccgtatttccccccacagtatacatagaagggggatcgcccaggtgttcgtgtgagcctgtccctttttttcgtaaaccacatccttggttcggccttttcgctatgggcaataccaccagcattgccgctggacgtgactgtctagtatccgccgtcggccctgctcatgtcacattccaagatgcgcttctttaccagactaccgcagtcgacccgtacaacttgaatatccccgtcaccccggcggcagtcacctaccctcagtcagcggaggaaatcgctgctgtagttaaatgcgcctctgactatgactacaaggtgcaggcgcgcagtggaggacatagctttggcaactacggtacggctttagtgataatagtacttcagctgcccgcataattaagcagtcgactaactcgtacttggctctaggcctcggaggacaaaatggtgccatcgtagtcgatatgaagcacttctcgcaattctccatggacgagtcgaccttcgtcgcgaccatcggccccggaacaaccctaggcgatctcgacaccgagctttataatgcaggcggcagagcaatggcacacggtatttgtccgaccatccggacaggtggccacctgacggttggtgggttgggcccgacagcgcgccagtggggtctagcgcttgaccacattgaggaagtcgaggtggttttggcgaactcgagtattgtgcgggcgtcgaatacacagaaccaggatattctattcgccgtcaaaggtgccgctgccagctttggaattgtcacggagttcaaggtgcgcacgcaggaggcgcctggcctggccgttcaatattcattcacgttcaatctggggtctcctgcacagaaggcgaagcttgtcaaggactggcaggcatttatagcccaggagaatctctcctggaagttttactcgaatttggtcatcttcgacggccagatcattctcgagggcattttcttcggctcaaaagaggagtacgatgagctcgatctggagaagagattccccaccagcgagccgggtactgtgctagttctgaccgattggctggggatgatcggccatgctctggaagataccattcttaagctggtcggagataccccgacctggttttacgccaagtccctcggattcacccccgacacgctgattcctgattcagctatcgacgacttcttcgattacatccacaagactaatgccggcactttggcctggtttgttaccctcagcttggagggtggtgctatcaactccgtgtctgaagatgccacagcatatggccaccgcgatgtgcttttctggttccaagtgttcgtagtcaacccacttggtccgatctcacagactacgtatgatttcaccaatggcctttacgacgttttggctcaggcagtgccagagagtgcgggacatgcatatctcggatgtccggatcctaaaatgcccgatgcccagcgtgcgtactggcgtagcaaccttccaaggttggaagacctcaagggagacttagatccgaaggacacctttcacaatccgcagggtgttcaggttggtccctaaggcgacgtaggtcgacattctgtgtgtagtatttgatgggatcgacaatgtgtagtggaagaacaccgtctatgagggtcaatatatagtgcatctatattatcttgaatgcgaggtggactttttcggttgcttcctcgagctaattcttgtatatagaatctactataggtgtttctaatattaattgttaatcgcaagatgccatttacctttcaagtatacgtgaggcacccgcaaacgctcaggatatacctaaacagtgaattagaaacagatatcttgagtggttggggaagcaagatacagatttgtgtggtgactatgtggatgatcttgaccaatcctgcaatgctgggttccgtccgctcgttctcggagaacgcaaatataatgggaaagagcagtagacaccttgattcacccaatcctagtccgttcgtcgcattttgccaaggagggacgtgaaagtggtgagcatcaggctggtattgcccggttctggactcgattttccgggaactgtaggacccaggcgttgaatgaactatatacttcctgagcacttgaaacccccaaagtagatgtcgatcgagctgccgttccaaaagcatgcctatggcctgttggaaacggccttggagatcatccactctcccggaaatactcattcctggataaggttcgccaggacggccaggtttctgctgcatggttttttggcggctccgttcttgtatatagggttaagagatgagcctggaagactgaaatggagtttttttcagtgagtcttctgagcctggggtgggtgatacatctgggacttacatggaaagtaaagatgaagagaagggatgatgatcttgattttgatagaatcaacgcaggtacgtgggtaggcaagcactggacttatttacagttggcctttgagtggttctgacctggctttgtcctgaatttcgtatttgcaacttggaatggcctattccctacttgtcgtctggcctattactagaaacgttatacgatgagcttttctatatgtcttcttgttgtagaaggcagaatgggtcttataggctcatactccagacgacgtcttccccctcaagcaccaaaatagtgttttactcgtcaggaattacgaatgcaaaaaagaggctgccagacatagcctaaattcaatatgtaaataacatagcaatagctcgggatattcacacagaagcaaatggggcaaagaagagaagtagccagcacgctcagatgaacaataagcaagaaaggtaagaaaaagtaaagacagtggctagtagaccacaggtgtagagacaagatagttggcgctcatgtacatgcaaggaaaacccgtccatgtgtcgaaggacagaggagggagtgttgggataacgactgtagacttttcagaatgaatgtgagaagggcggatatcaacagcaagggaacagctctgcttgttcccataactccgggataacaccttgacaaatgggtaagaataaaacaagctgtaaagacaaggaaatacattttgtgtggtgtcgaaaggaaagttgggctcttctctaggaagagacagggttagaaaagagagtagggagaaagtgtggtgagtcttatgtgcaaggagggacgaccattgatgtccattacaattcggacttgactaggtcttcgacttcccattgggctctgcgtttgcccatcatctcctcgaggacgtcgagacgctggcgtgtggtacggagggcatggtccatctcacggtcagatatcttctcttcccgaagccgtgcagcaagctcacgctcatcactcgtactggctccagacgacctgcgacttgggtgtggctcgggcgatcggtaaacgttggggaagaccattccgtccataccaacacggtcttctagccagttccagagctctgtttcttcacgtcgccacatctcctcgtatgcagccagtctctggggcaagctgtgaccgggacatccgacttcatgtgaaaccatagacgatggcgacggggatcgcaagaaggccatgtagaacaagatcccgatgattaaaatagcgaagttgctattccatagcggactaagaatgctagtgaagggctccaggagggggcggaccggttcgaatagtccccatgattcttgctttgaggcgttggaatccacagcaaccttcaacgaagcaactgcagtcgactcccgccgtccgctatcacccttcttgcgctttcctttgccccgcccagctccattggcacgcccacggggaacaactccaacctgcagcgctttgacaagctcattaccaaaggttgtttgcccatcaatcgcacctttctcgatgggacctttaagccaactcttgcctgaccactcaatagtacaggtcatgaggaagcgagtttggttgccaggagcccacgtaaagaggtacttggtcatggtagcaaaaacgttgccactgggcacgtcaggtgtttgggtgctcaaagtgacaagaacggccttttcaaggtccaagaagtccatgttctcggtactgatacattttgtctgcttcggaccaatggagccgttgagaggtttgatgtatgagtacttcctggttgggctttccattgtcaagcccttggctgtgccctcgaactgcagctctccacatttctggttttcagcaaggaacttggtcatgaactcgccggacgctgggccgaaaaccaaagagaagaccttgccgagcggggccggaatgatttcatctttgatgactttctcgtattgtccattggcgtcgacgtattcggtgggtgcatgtgtagtcggacctgggaaatcagcaggcgcttccttggaagtgcctttgtcgccgttctttttatcgccattaacatttgtaccggccgctggtagagctgcattcgcggatagactcgaagccttgcggcttaacccttttcgcactggcaatgagtttgcactggcgttggcactgtccccggcctcgaagaagctatcagcattgtccccttcctcgtcctcatcgtatatttcatcttcatcagtgacatcgctttctgactcgctctcctcctccccaaccttctctgtcttatcaccggtgccatgggtcacacgggtcccgtttacagagctcttgatggtggggtggttaatcttccagatattgaccattaggtcgtatgtggactcgcgactgagtaaactgcggaaagtgtgacgggcgtggagtgtttgaatggcaatagcatttgggaacaccatagccgtgctctccttttcgatggcaacaacctcgtcgaagctgatcactagagtcgtgacccatcccaggatgttactggagaaacagatatgtccttctgagatatagatgcggccggcaagaataatctcacgctgcaaagcacagctgtaatcttcgataagataatcatcttcaggtacactccggaataactggtgaaagtcccgattgcgctttttacttgcaaccgcgaagccagtcaaccgaggcacactggaattggcaccaggaacaccaagcgcaacggcattgacgccaatagctccaattgtagaggctgtggccccagacgagccccgatgacgccgggcgagtctgctgcgcacactgccggtgcgtctgaggcccccgctcaggtcgccgtcaatgacactaccactggggggagtttgatcgcccataatcaagccatctttcggaagtgaggtggtagactgaaactccagggcgtcttctgcagagttcggcaatgaaacctccgatggcctttcgtatgctacttgaacagcgcgcgctgcgcgtttgtcttcaattttagcagcttcctcatctctccgggcaacagctgtgtttttgcgcttgtcagcggagctcgctggctttgttatcaccacgccgtcggcagtcgtaattgactcaccgggtcgtgcgtcaatgtccagatggctgaagttaagatctcctgccccaagagtctctacagcagatggtctcccttccaccaccttgcttccattatctgatgggttttcggcctccgcggttgattcggtgagggatttatcagcatcagcaagagcaggctgagaaggtgggcgatttctctgttgagcgttgaggctgttgctgaaggaagtggcggcgttttgcgcaactgaaaacacagaagagaagaagccgctttgctggtttgaagccgcattcttcggcccggaggtcttttcttcaaggggtgttagtgcagatattgagttggacaacttgcttgggccatgagctgcagaagcggaccgcacccggcggtgagagatcatgtttccagaagggctcacggtggtgactccagcagacggaggattttcagactgtagagactcgggcgaatcggtgacatcgttggacaggatttgcgcactgagagggcggtgctcagttggtgttggaggagttagagttgtcgctggcgcaggaatagcagtcttgggtggagtgttcggcatggggctcgcttcaagtgaacgaggtttgttgtccgttagatcagtccgaattggcgcaggcagaggcgggacatcatcaggggctgcctgtgctcgtttcgaggaaagactgctccgccggctagatccgaacagacctcggccgctcttgttgcttccagacttagttgatgaagtctcaacgtcgtcattggtacctttcttgtccgagccaaaagcgcctttgaatcgtcgcccgggtgatgtactgcgtttcttgccatttgggtccgtgggtacatccaatgccatacccgatgttgcgcgtcgggatattctttcactcgggtttgaatctgacccagtggcactgggaccactaacagctgactcggcatcagcattggagccttccgtgtttccagcatctaccgatttggtcttgaacaatggggaggacgaggtgtagaagccggtatgggagttatgtgaggtgagcggcgggggcctaaacaaaaccaacaagatcggcgggttagaagtagtccaagacaatagagaaccagtttctcaacttacccgtccggctctgaatcatcggtcaacagactattgccttcgccctcatgcgcagagctctctgccttcaacgacggggctgcggaggtcccatcccgagacccattggaccgactttcgtgtaggtcgtgttcgaaaaccacaggcggcaccgccggctcgtcgttgtgtttttgtgtcttctttttattctctttccgcctccgacgcgcatcgagtagctttgagaatccactaggaccagccttaggatctgctacttctccgccctgggttttcggtctctcgacagcggaatcctgggatgaccgaccattgctctcgattgcacttgattctgcagatattgtccaggagcggcgcgatctattttcacctttcaagcttgaagacgaagagtcggccataattggaatgtagcggaaggtgtatcgagagggtgcgggcagaccgggaggatcagggggaagttgtcatgaggtgtatgtaatgaagagtttctctctctctcttgttttgcgagagaacttccgtacatagacggggaaacgaaagtaacgaaagagagacaaagtggtgaattgtccgaacatcccctggagctccgcaacttagtcacccgccaagtgaagatggaggcctcagactgaaactgtttctgttcaattggttttatttcgatattcgcattgaaatgatattacttgcaataatttgtagctactgctctacatttcctactgcatatatattctccctatttcccccctccatcaaggtagtagaatggcctgacagtatagctataagcatctagtcctctccgcttctccactgtgtagaatgtggatgtaactggacacatttgctgctttcggtttaactgaatagacagtatttgttctataatatcgatctaggagtattactttcaagggttacctcttacctcgtgtacttcaatttacctcactgtatctggtcccctcgtgttactgtcatctccattcacagtgcataacgtcacttctccaacattccccggataaatcccatcaaaggaatgcacctgatttttctctcttaagtcctgcaggtgaacttattttcgtcatggaagtagctcctttggccctggtaagacctcaacccctcattttcaggataatctgaccggccaggcccacactcatgcccggaacgcagtacttgagactcgcaaggccaacccagtcgctgccagcgaggaacatgatctagctgctggtgaatttgcaaccgctgcacagagcagctccgaccatgaggtgagtcttgattgaggagaagatctgcccccgcccccggctcggcgatgagctaacgcgtcataaggccctacggaccctacgcttgctcgaaactcaccataagaagctcgccgaaatcctccgattccagcatgaacatccatctaacacccctgctgaaccggcatctgctactgccacctcaacattagcgactcagcaaactacagccgagaccgggggcacaaagagcgcagtgagccaggatgcacatctaccaccaagattggtaggcaacgctcgtctgccaagtcgggataaatcctctattgctagtaacttagcatccgcccgaggaatcccatcgcacccccgacgtgggtcgcccgtgtcgcctacacttacatcgcaacatgtcgcggcaaagatgaccgaggcgccacagagggctaaagtcggtgaagcaaggttacgtgacggagcagcaaaaagtcgacaaagtcgtatttctacacccagacaaccatggtctcccccgacacccagtactgaggtggtttcccagcaaagtgtacctcctagtgcagctgaacccggcggatcgaaagataagcccgcaattaccgatgaagcattcaatcgcttctactcggccttcgggggactggtttccaaggtgtctggacctttggcatttgcagggattcaaatggggcctacggatccagtccgcgctgaacagagccgcaagtcctcagccgaggtgaaagtggaccgcgatcatgctgttctagatcggtccatgactgcaggtgagccggacgtgaacaagctcttctctcgagctgcattgcgctcgattcgggacggttctggtgcaggtcctgggaacccagcagaatcattctatgtagtgccaactacgggtgggaccatgtcatacgctgggatcctcacccgagctgacaagcaggcacgcagaaatagcattgaggatggtgacgatgactttgtggatgctcgggagaccccttcatctcctgaaatgcgtcacagtgccagtggttcacgcgtatgggcgggacgccgcggcgcatccgataagctcactgctccacagacacataagacaatggaagagatgcagatggagaatgagaccttgaggaatttgaccgattcactggcgacacgattgcatatgtgggaggtgagcgcgcaatcttcgtcgatggcgcttcagcaatcaatccgaatgatgcaccgccagagcggcggaacacctgattatgcccagccttcaacggccactacctctcctgttgctacgctgactgcgccgccggctgcggctgatactgatgcgcggatcaaagaactggaggagcagatccagcgcagtgagaagaaacttgaaactgccactcacgagaatgacaagcttaaaaatgtccttgggcgttaccgggaccgctgggagaaattgaaagagggtgctaaaactcgaagagcggagggtcgctctggtgacagtcaaagcaacccacctgcaagtggtgctagcaagccgtccgccccctcagtctctccagatcccggtcgaggcccctctaccggtcaagctgactctcgtgctgcgggtgataacccggcatagtccggcaacatccattctcggtggttggaaacggcgtttggtcctctaatgctatcctcttttacaagatatgatatccccctaacacaatttatgaagctttgaatccatttcgttttgatccgaccgatagttcagtagccattcgatttctcgtctaatctcagcctagtggaattagccggaggggatagagtatgtttgatacctaggtgaaatgatgatcagtgtagaatagtatccaaagttacatatccacatcgagaaatacaatacgctcggggtacgttgagcaggacaatgtagagaccatccaagaggatgcgaatgaatatctgagaaatctcaagctttcatttccaaatatgacgcgagatatatacaacgagtgatgcgacacgcacgaagcaactcacacatcggactatatactaagaactaacttcccttcaacgtagacatcacaacgatcactgaacaataaacgtagcattaccacgaatatcctcggagctgctgcccacaaggacagtgaactgaccgggctcaacaacatacttcatccgagtattccagagaccaatatcctcaaccttgataggaatctcaacagtcttagtctccccagccggaataaccaccttcttgaagcccttgagctgacgattaggaacaacaacagtggcaatatcatcctggatgtaggcctgcacaacttccgtaccgtcacgagtagcatgggtattagtcacatcaacgctgacagtgacagtcttctcagatgcagagatcttgctcttgtcgatcttgatatctccatacttgaaggtggaataactcttgccatagccgaaggggtaccacggcgaggcgtcaccgagtacgtacgagtggccgaataccagagtcccgttttcatactcgtggcctacgtcacccatagagcgtccggagttgaggtagtcgtagaagattgggagattgcccacgtagcgggggaagctgacagacagcttgccggatgggttgtagtctccgaagaggacgtcagcaagggcgtttccgccctgttcggatggatagaactgttgcaccagggcagcggttgagttcgagatccaggtgtctgtgatgggcttgccgcttgacaggacgacgattgttggcacgcccgtgtcagcgatggccttgatcagaggtccttgggcgcccacaagggacaaatcgtttgcatcaacgtgttcgccagtcctttgcatgtgttagtattgggacttagatatatcttgaggcaaggtcggttcactcacgttgcgttcagtcctgcccagagttctttctggtcgcgcgaccaggttcctacaaccacgacagcaacgtcggatttctttgccgcctcgattgcctcctcgaagcctgactggtcgttgcttgctcggtcgcatccctgggcataatggacctgggcttcgtcgtcaactgcagccttgataccttcgaggggagtgacgccccggtactgactcctgtagacgacatagtcaccatactatacacctcattaatatccagtctaacaagcgaaataggtttgttgacttacgttcatgagaccgccagccataggcccaatgaccgcaatgttactcgacttcttcagaggcaagatgtcttcgtggttctcaagcagaacgatagactctttatccaagtctcttgcaagttccacagcttcggggctgttgatcagcgtacgccactcgtccttaggtgcagcggggtacgggttctcaaagagacccatttcaaacttggcccgaagcaacctagcgacagcagtgtcaacgaccgcaatatcgagcttgccggactcgacaagctcggggatcttttgaaagttgctgttcgccagttagtgtctatagctgtatcgtttgatttcaacggagcttacaatgaaccgcctcccatctcaacatcggttccagcattcagcagctgcgtggtaaccgcttccatgtcaataggatcgctctcacaaagtttgaagtacgcgcacactctgtcacttccaccggcgtcggtcatgacgaagtactcatatccccattcttctctcaggatctcagtgagagtgtggtagtcagagacggctggaataccatcccatctagaaacggatgttaggatgatggtataagacaaagctgactaggctggacttacgagtggtacgcagccatgatcgaccaagcaccggcatcgacgatagctcgcttgaaaggaggcagccacctatgcaatgattagagaactattcagaccctgggtctagggctggcatacgttgtgcgcaattctctctcaccaccgtgaactgggccagtattgaggccttgctcgggggcgctaaagcctgcgaagtgcttgaccatagctgacacattcttgccctgcactcccttaacgtagctatacccgtattcgccggagaggaaagggtcctcggagaagccttcttcgaccttttccctctgttgttagcttcattgcgctgaatatagtaacatgaagatgaaacccacccgaccaaatcgaagttcacgagcaaggtcaacaacaggagcgaagagctgattaacacccagggctttggcttcttgtgcgattatttctgccattttttcgacaagctgcgcaatatcgtgtcagacctcaaacgcagtatgtatgacagtgcaagtataatatccacttacctctgtgttccaagagcatccgtacgcaatgggcgaattgaagatggtggcattaccaatcaaaaacccgtggatacctggtgcatgacatgtcatgagcttgggatacaatatacctcgagactatattcttgaagcacataccctccgtctgaactagcgcaggaattcctagagttgtgttgtggatgaggtagtcctgggctttcttaatgttgtcggagatccaatcccaagaaacagggtacccgactgcaaagcattagtatttgtgtttctgcgaactgatacaaaaggatctaacagctaaacagggaatttcataccatagaacgagcctgccttcagctccatgttggtgaccaggccggtgtagttgaattcccccgaggtttggttcatccaattcgtaacatcacctgtacaagaattcatcagcaattagaacttccctatggcggtttgagataagccataccttgaatcaactgggccctcttgtcctcgatggtcatccggctcagcaagtccttcactctcttttccactggagcattggcatccttgtaaagaggactgtggctcggtttccccaaagctatggcagcaaagagctgcaggagcaacagcccactggaaagcagattggccaccatgtcgatgagaagataaccacttgttttccaaattcaatggccaagggctgttgtcaactggctatcgtgagattggaaggaagaaaagaaaattgttggggaagctcttgcatataacacccttgcactgcggagacaggtaattcaactagagactggtcgcattgcatgatttaatgatcactaattgaggtaagttttaccattgggcatcggaaatgaaaccgtcttcagcaaagggatcagctagtctccacggctgcagtagtgtcctgcatggcgttgtttcaaccgagctagcactatcaggagacggagcaataccccgccggcactctggaatggtgttctcggattgaggggaaaggcctgctttccggctgaaatgacttaagaagtggagggtaatcaagacatctggggtatctctcctgggcgatggtgcgtgctctcagctttttccacctattagggctgcctctcttcctccgggggagtgagatacacccggaactctggtttgaagaattatgtgtggtaggtgagcaatatacaacgtagataaattaaaagaataagaggctaaaggcaagataggtggctagtaacgctgaaccctcctttgtgggtgaagtatacagggtgaaaagaaatgatacattgacaaaatattaaacatatatccgcagaatgcaatgccaattacaaaaatatgccgaaaggaatctacccggaagaagaacacgaaggggaataatgaaggaaagggggaggtgtataatgcatcagagctagggagctttgggttgattatcgccgagcttccgtctcggcgtcaaaatcaccggtgttgcgacttggctcgggctgtgtctcattctctggtgttggcgtccccgttgcagcgacactgtcggcggttttagtgttttgggctttacgaagggcaccacctagccacgcaagcccgccactccacgagtcactcaagctgcgaagacgagtcacatctgcgttgatcggttgttttggtgtagtatctatttctgtcgcaagagcttgggtcgagcggccagcctccgcgggtctatccgctaggttagtggccgactgaagtcgagcagttgcaagggaaagcgccgcgtcgctattgccttcgagggatggatctgcaaaagcgccgtcgagttgacgccgacgtcccactctgcgccttgtccgatccttgatagggctaccgtcgccacgccggatagaatcagcaatcaccgcagtgaagccaccggaaagtgtgggaagcagaggcccgggggagaaacgatgggagagagagctgcgcaaaccatgtcgcgatggtgtctcaaggagagtgttattgcgaatagcgtggctggcttgatctaagagcgtggtgggggttgaagcacgtcgtacagtactgacgttatcatgggcgcccgctgcttcttcaagaccgggcgcaggagggaaccgcagaaggactgttgaggcttgcgccgcttcgtcttcctgcccaggaggagtaacagggcggatatcagactgtggggtcacgacagcctgatcttcgatgtctgcccatggattggacatgcgagatgggggccgcaatggtgaagtgtaatcaaacgacggagcagacagaggagactcatcggttaaagatccacgaggcgaagagggtgcagcggaaattacacctctaggagtagactgatcatcatcaaccccatcagtgctcaatatggagccccttggggactgtggaacgtcatattgtgcttctatagaaacgcctgatgtcttcggcagttgaggaccaggcgggggcgaatcaattctgtcataataccgttcaccattgagtaaaccaatggacccctcctcgtcttcggatgaaaatgacgactcattgtcggcggcgactctgccgctcgtgatgaagtaaactcccaggaaagtcaacagacatccgccaacaaactttgccgcgcgctgggccgttatcgattcaaaatcacggtaaaggaccgcacttccaatgatgacagcgagagtgaagagaacaaactgcgtcggaatcacctgggtggaatcgaagcgctgcagagcacgattgatgtaacggatttgcatcaatgcactggagacaagaacgaagaccagcagataggtaatagggaatgtaataacatgccataacgtgccagacagaagcgaagagacacctttcgtagaaagagccgtgtatccgcctgttttatacggttagaaacaagaccaagaagaactgagcccaaacactaggaattgctagaaacttaccaaataatgcaacgagcccaacatctatcagaatcgatcgcgatccatactgatggcttgcccacatcaggccgataatcaaggacgtggtcagcccgagatagagctcgaactcccatcgcgtgatgctcgcccagatttcaccaggcccaatttgttcttcggacgatttagcactgagaacaacaacgacggcaccagcaacagagacgatcacgccccagagatcgcgcttgcggaatttttccttgagcaagcatggcgcaataatacaatttgatattaaagccacaacgcccaacggagaaacaatcgacgccggtgcaaagccgtaggccatgaagttgcccatttcgcccacaaccatgagcacgattccgacccaccagtacggagacttgaggtaggatttgcggttgccgtttgcgccatccttacttccagtgctagtggcccgcgagcttgaaccagtgttcctcctttcggtgtcgtcgccatcgtcatcgcgataaggttcgaagtcatcctgctcagagtctcggtattggaccggggatcttcctcttaatccgacgtgcgttccgtttgcaaatcccctgccgcgattcttgtcctgctcccattctcttgctatccgaatatgcgcgtagcgttggatattgagagccaatgagatcaaaacattgccgcataaagccgtaataattccaatcagcgatgaccattcatgcatgtttcccccgtcgttcccatcatgattatgaggagtccctgaggtggagtttgatggcgcgacaaaaatttggtggatagaagaagccgcggatatggatgatctcgacggggagatggccgaagaaagaagaccgggcagcaggcttgctaccagcgatgactgggaagatgccatccgttcgtctgaaatgatgcgatccaaatattcgagtactgtttatcgtacgtcttggcggggaagctcttttggttgtcaagcaccccttacacaccccagctgtccggcgggtacggccgatcaaaacgaacccccagattcgatggtgagcatttgatctcaagtcgcaaacgacagcattgtgttccgagtattccgaatttctcgcgcgaaatttgccacgtcagataaggagagtaatgagtatgagaggtttggggaagcggcagccttacagagcggaggtgcgccgcggagataattgatatgtcagcaccaacccaacctccgggggagccgcttccaaggtcccttgcggtcattggagactacgcggtaatttaacgttccacagtgcagatacgaattcaaacagcgccaatgcgacgtttgcgcgaggtcaaagctcgtgcgattctcttcatggctacatatcattggcggctcgggtgggcagttggggatcgttgggctcttgggggacgtcatggagcagcaaaagaggggacaactcagagcgaatgtaaggagctgggtctggtaagattctggatacttatgaaactacaaactgtactacatattgtatatcgccgaggcagttatatttgagtcgttgcaacccaacgcaacccttctgataccgaaaatcatggtgagtatggtacatctccaagcagatcatcgctttgctttcttcttttccgggccttgttcttcgccatcactcagttccgcgtatatggcctttggttgtgtttccttgtatgccttggtgaatacaggctccttctccgctttgtcggcatatttcaagagcgcttcacgtggatcctcatctcgcatagaactaagtggaatatgctcgaggatgtgtttttcatccggggtattctttgcaaacggtgtctgcatcggcaaatgcggccggcgaggatccctcgagcgaccagaggctgtaaagccaactgtaggatgacgagcagacctggttgccgagctgtaatgcggaactccgttggagccgacaaccactgaatcacctgccaatccctggttcaaatccgtggtgatggcaatttcatcgacgtggcggcgctttggcgccttggacataaccgtcgctgcgcccttcgtggacatggtcgggttgtagaggacgtggttttcagcattggcggagcccgtcataatttggttgagcttttcatgccatagaacagtaatcaatggcgaccccggtgttactggtgtgacgagttctggcttgagagtagcagggttcaagatatgcaggtggccggtttgagagcctgtgatgacattggcagaggaaggagagaactggatgttggatgtcggatagcgggaagatgtcgaggtatgtgtgacggttgtgactggagtcttgaattttctggtatcccaaagcttgatcgtatcatcaccacctctcgtgataacaagccttccatcggaactgatatcaagaccacttgtccatgtatctttgacatgagcgtcccggatctctgcactgggtcttgtgtatgggccctttccactccacatacatagactcccatcgagagccgcacctaccagaatgtcggtgcctccttgtttcggcgagccccatgcgatggcggtcatcttagtccgaccagcggagccagccgcccgtgacttgtgcacgatcacctccctctgtgagcggccgacgctggcatcccagatgcgaatcgtgctgtcggtcccagcagtggcgcataggttaggatcagatgggttccatgcaccacaagtaacctcagacacatgtcctttggtatgatgtaaatctcgtagatacatatcacccttcgcaaattctgtgagtatctcaccatcgcggctgagaattcgtggctgcggtgtggcagtcacagctagaacataacttggggagagcggattgaacgcggcgtagtgcaaggcgtgggtgtcctgggccgccgtcgctttcttggctgaaggatcgacggacttgaaagcgcggagcgtggatggagtcattgacgcaaagtcatgtagtttcagtgtgcaatcggtagaacctgtgattagtcgggcccccgaggggtccacggtcatggtggtcacggcacgttcatgagacttcagaacgagctcatgcgatacgggaaattcatcctcatcatctgaatcgtcggagtcttcatcgctattatcttcgctgtcttttcgctcatcatcgcttcttctttcttctgcgctaggggctgtcgttgcagtgcttagttcagtggtctcgggttttggagccgaaatattggcacgcttggatcggtcgatctgggtctcaacatcaacagatttagcctgcttcccaaagctggagggaaaaaacttgttgaatgcttcctcgtcgaattcatccatgattgagtgtgtgagagactttgcgacagatgaagagagaggcttcgactttgatatgagcttgtttgcagtgtttgcaactcatgactgataagccgaagtgcttggcgcaggcaatctcgcgcagtagcagcgaattttgtactttggatgtatatttatggataaatttagggaaatagctgggcgatgcgccccttagattcgttcgtcactcgattattacaatacagaatggacctagctgagtacaggtctccagtgcaagcactcgggcactgtaccctcggatgattgccagcgcttacaagtatagaccctccacaggaccgccgtcctgcttagtcttcatgatgcgctcacgagcagctcggaaatcgtccatctgcaccctcatgcggcgctctctcaaggccatcaagccagcttcagtacagatagcccggatgtcggcaccagagagatcatccttctggttgatgaactcctcgaggtcaacgtcgtcgccgagagacatcttcgatgtgtgcagagtgaaaatcttcttcttggtgttttctaaaaagaattgtttgttagttaacttcgacgaaacagcagacatcagggtatcacttacggtctggattctcgaagagaatcttacggtcaatacgaccaggtcggatcaaagctggatccagggtttcgatcttgttggtagccatgatgaccttcacatcaccgcgatcatcgaatccatccagctggttcagaagctccagcatggttcgctggatttccctctcaccgccagattgtgactcatatcgcttagtaccgatggcatcaatctcgtcgatgaacacgattgatggagcgtggtcagcagcaactgagaagatctggcgaaccaggcgagggccatcacccagatacttctggatcagctcactaccaacaatgcggaggaaggttgcgctggtctggttggcgacggccttagcaagcagcgtctttccggtacctggggcaccgtaaagaatcacacccttagggggcttgatacccatctcttcatacagctcggggtgtagcaagggcagctccacggattctcgaacttcctggatttgctgctcgagaccaccaatatcggcgtatgattcagtcggtgccttgtccaacttcatcaccgagacaagggggtcagactcctccgtcagtacgccgacgacggacactgatttgtggtgtagaagaatactggcacccggctcgaggagatctttatcaacgaaagacatgatcgagacgtagtactcagggccggtagcacttgagacaatagcatggtcatcatcaatcaactcttccaagttgccgacacccatcgggctgcctcgcatgtcatcaactcgactccgctcgtcggcgttccgatccatcacatccaagtcgccacctcccttggcgggatcctgggttgcccgggccttggccttgcgcattcgttccatattctcgacgtactcttcttctaacagcaggtggtcgtgaacacgctgcatgcgaaggtatcgtagcttgcatcgcgatgtaggatagatatcggggagcttggaggcagtgcttgggccggcagccttgcgcttcttctttccaagacgggtggtaggtggtgggggaggctcgtacttaggcttgtccttctgatgaatgaaagacggtctcagcgctagttgtgtagcagaaacgaattaggaacataccttcttatccttgtcatcgcctccagggcctccagggccgccgcctagattagactgctgttgaccctagtttgaatgttagaaaacaaatcgagatggcctcccaaaggctggcaagattgaggcgctcaccatgtttgtcagccaccgagatggaggcaatcagaatcccttgtatgaatttgcaaatgaatcagagtagggtggatcccgagcctcaaatagtatttgaatgatgggaaaggcgagttgaaagggatgattgtcaatgcagatgtggtggtatcgccggaggtcaggcgctgggcgagctggaagctgttaggtccacacgtgactatttaggcctcaggcgtccactgcgtcattcgcgccttattgccttaacgcctcggcaccttgctttgactccgacattctcgaagacagtcaaagaaatttatattccagcaaggctctataccgagagtatcttacgcaatcgagacttgacagttgcgttcttttctcgaggtctatatctcagacacgtataactggtaacaaggtgacaggtgtttgagctcatcattcatactggattcccgtatagttcccctcctttggtgagattctcgtcttgacttgctttcaattccctagagggtctcgtactctgggagtgatatgatctgaaaccttcctaacaccatcctcctacaattagccccactccgccttcctctccacgacagtttctactctcttgtacagtctttaacaagacggaataggtctacttgtctgcacagtttgcacatacagcggtctcatattccaaaatcttttgtttgacgtctttctaaaacaaacctcgaatcaccatggctagcaaccgtatgcgtcgcattggaaaagagattgcggacattcacgccgacgcccactctcaaatcaaggcagagccatttggcaaccaggacgatgtcacacacctaagggggtcgtttccagggccgcctggcaccccgtatgaaggtggcacgtacaatatcgacatcaaaatccccaccgactaccctttccgaccacctaccatgaagtttgagaccaaagtgtggcatccaaatgtcagcagccaaacggtcagtacccttccacaatatacacttgagcatatttggattctaatggccagtgtagggtgcaatctgcctcgacacgctttccactgcttggtcgccagttctgaccatcaagtccgctctgctttcgctgcaatctttgctcagcacacccgagcccaaagatccccaagatgccgaagtggctaatatgcttctcaagtcacccaaggaatttgagcgtgttgcacgcgactgggcagttgtctacgctggagctcccgctagtgctgacaatggaagcggatcaagcatagatgacacccggcaaggagctggcgaagacagtcttgcgaagtgagccagacttctgccattcaccgcatatagatgctgactatgacctgtagatatgacggatacaacaagaatttgatcgaccgtttctccagcatgggcttcgatgttgatcgtgttgtggctgctttccgacatgtcggggtcgaacgacgaggaggtcaagactacgagttggaagaaaattctatgggtgagattgctgcccgacttctcggtgagtgatgtacatgtatattctggtgtctgggaggggcttggggtagaatgcggcaaaagcacatatggatcaatggattgcattgggtggtttatgatgtcaagtatttgctacattgctttcaatcgatattcaaatcagtaaaacaagaacaaaataaactcccaataactatattgagttgatgttaggtgaagtgaggattggtgttatcgataagcatcagctccgagcaacaacctcctgcggaacaaaccaagtggattatttgctaggctcattgaataattgtcgaatgtttactctcatttctaaaacagccctcattttcctcttttccctactcagaatatctctttggtgatactctaagccgccggccgttatcaccgctatctcacccaggaataaaggtttccagccttccattcttccaacaagtcaagggcaccaacaccatgattgaagacgacatttaccgtgcctcatcccagtaccggctgtggtcatacaccgagccctctctgcaatctctcagagccacgacaaatgccgttgccagcgagcgcgtgcgcgccgctttgcgcagatcgtgcgaagctcatcagtcgactgcaacctccgcggcgggaacaccactaccggaaagcaatatggaagtcaagaataaagatgagaaggacgttgaatgcttgacgccagaggaggagctcgttctcgtgcgctattactgcgagaagacgctagagctgggagagacatacaagccaccaattccgacaatggtccgggtacgttaagctcgacgggacttcactctttccttgaaagtcagtaccaatgaaactgagaatctgacttctctcgtttgcgcatacaggccaccgcgatccaatacctccgccgcttctacctaaccaattcgcccatgacataccatccaaagtcgatcatggcgtgtgcgctcttcgtcgccactaaaaccgataactactatatttcccttcggcaatttgcagatgggatccccggcgacacaacgacagaggacgtcatcgcaccagaattcctgctcatgcagggactccgtttcacttttgatgtacggcatccattccggggacttgaaggcggcgtcctggaactacaagccatcgcacaaggccaaggccagccagccccccatctaccatacgagaccgcagaagatctccaacaaggattgctgtccatcgcacctcctcccgtcccatcgtcctcaatgtcagatcgaatcgctcgtgcccacggcacgactcgtgagctgctgaaatccgctgcgcagatgacggacgcctacttcttgtacacaccatcccaaatctggttttccgccttcttactggcggatcgtcccctagccgagtttttgctggatgtgaaacttggtggccctgtcacagccacaattccagcccccgaaacagacgaaaatggcctggtgaaccctctatacgaaatccgctccaagctgcatcacgtcttgactgaatgctctgcgcttctccaatcctacacacccctctcctccgacccggcgcaaatgaagagcctcaaacgcatcgcaaagaaactgtatcattgtcagaaccccgagaaggtgaatctggctgctgctcagaaacgggaatcaacccaaccatccacagctgttcaaagtgacgctgggattgtcacttcggagagcgaaacagaacgcctagcgaagaagcggaaattggaacaagaacagaaagtccgccaagaagacgacgtttttggtccggagttggtcactcagcggaccaagcagtaatgataatgaaagccgttgaatctaaatacgcattttaatcgtaaacaccagaatggacacagtcctagatccacctgaagacctctctctctctgtgtacagacatgaaagcttgaatgtctcaagtctagcagggggactgacgaattcccgtcatcatcggacagaaacactgcataaggaatcatatgaatctaccctctcgatatccgttcggtgcgatatcaatggttgaaatcaacctttcgtagaccgtccagtagcaagtaaatcctgtagaatgtatacaacaaagccattagtcctgtgctggtacaattagtatcatcattgaccgatactcttccttctacagtccaaaaccaaacaatcgcctcaaacccgaagcccacaggcctctacaaaccataaaccagaaccaaacacaataaaaagcaaaaatacaacattgcatagttattaaaaaggcagagaatctaaaatcccaaccaaaagatccgcaacaaccaaaggcgccgaatccccactgtcgagctcctccttgagaaccgccagttcccacttaatctcaaagcaaatctccttaatagggagcgaaccccaacgaacacgcacgcgattatcatcccggaccccgaactcgccaacctcacccaagaaaccaatctgaatgacccgctcacagagctcctccagccgtgtcgggatctcctctatatcagggctgggggataggcttaggagaacgaagacctggcattgcagcttgtgcgtgaaggcttcgcaggcttgtgtatagatttctaggaagttgtgggggtgtatgcgagctccttccatgctgacgaggtttatgtagactttctggtatgtgagttggttaatttgtgagggcttacttagatctagttgtagctgggagaatgggatgggtgggatgggcgggatgggattgtggtgagatccggttctatttatgtatgtctttttggtgatgacttggatttggttctttgttcaaggagagaagacaatgagggatagtatagccattgttgatgttctttgttgcttggtgcatcgccatggtgcgttctattactgtttggataagaatacctaggtactcagaaagagaagaaaggctttggcaattcgtctctggctgatcctcagagccatgataacaccgttgataggcatgattgtctaggcaggacatggataaatatcggaaggatcaatccagaaagctcaaatcatgtatataagtaggaccatgcaaagcctgagagaatacagcctatacttcaaacggaatcacaagtcatacggatatattttatgtatttcagcgtaactggcatcctttatattcacctcggaagagaggactagatactctatcaaggatgcagacaaagcgaagaacagacggatcgaatcaggggtagtgagttcatgatagcaataaacgcaaaagtcctatcctcaacccaaaatctattcggaaaggagggaaggacaaacgatctaacggacaaaaagaaaataaatgaaaaccttcccaatccaaggaactttttgtcggaatgtccctatttgcgggacccaaacttttagtgccacgatgcgggcatttgtattccttcagttctcgtctagcatttcgtcgtcatcaataggggcaatagggggaaaaaaaacaagttgaacacagagaataaatagagcccttaaacggcaccggcagacaccatcttgttacggaggtagttcttgtagtcaccgatggagccatcccagcggcggatggtcttgtcctcacagaccatgatgtccttggcgatcttgtcgaggagacggaaatcgtgagacacgacgacgacaccaccgctgaaggcgttgatggcatcggccaatgagtcaatggtggggatatcgagaccgttggtaggctcgtccagcagaatcatgttgggggactcgatggcaagcagagcgaagacaatacgagacttctgaccctcagacagggtacccatgagagcagtctggccctcaccgctcagaccgtagcggccgagctgctggcgccagtactggtagtcctgggacttctcggggaagcggtcacggacgaactccagggaagacttggtgagatcaagctgctcagaggagtgctggctgtaaacaccgagcttcaagtgggtgtgacgggagacacggccaccgatggggctgagcttgccggtcatgagacggagcagggtagacttgccgacaccgttggggccgaccagagcggtacgggagtccatgtcgacaccgaggtcgaggtgctcgtacagagtgtcctcccacttaccagagtaagagaagctgacatcgtcgaaggaaagaactgggggaggaagcttctcaacatcggcgaagcggaaggtgaagacacggtcggggatgacgggctggatgaagccatcggcctccatcttgtcgagaatcttctggcgagacttggcttgacgcaccaagttagcgtaggtaccagcggaagcaatgaacttcttgatgtgctggatttcttcctgctgcttggtgtaggccttcatctggttggtctcctgctcgctacgggtcttgtggtacgaatcgtagttaccaccgtagtagaggagcttctggccacgcatgtcgagcatgttggtgcagacaccgttcaggaaatccatggagtgagaaaccaggatcaaggtacgatcccacttcttcaggtactcctccagccacacacaagcttccaagtccaagtgggcagtggggtcatcaagcaagagcagagagggcttgacgaacagggccttggcgagggcaacacgcatacgccaaccacctgacatgtccttggtcatcttgttgatggtgttcttgttaaagccgagaccggtcagaatgagggaagcacgaacgtggaaagtggaaggatccatcttgtccatacgctgtataaaaaagttagtttctgttctggaaaaatcaaggagagcaaaactgggaagatacgtacatcgtacaggtcttcaagaatagggctatcagggccagattcctcaagaacctcctcggccttcttctccatatcttccaactggcgttcagcctcgcgaacgacccaatcgagagcacccaggtcggtcgggggtgcgccctcgttcaggaggtagatatcgacgtgctcgggaacggggaactcgcgggcagcaatggacttgaggatagtggactttccgcaaccgttctcaccgaggagaccatagcgacggccgaaggtcaactcgagggtggaatcggtgaccaggacctttccgtggaacacaagggagcaagaggtgatcttaacgtcgcgagaggcgggcagagatgacagcacaccggtggtgacacgatcggacagaccgtgcttatccatctgggctgtgagcttatcaacggcggactgatccttagtggcaggcgcatcctcgacgattgggtttccgtgggcatcgagttcgaccttggcggccttcttgggcttcttctcgtcggcacgcttggccatgcgggcagccttcgaggcggaaaccatggttgcgggtgggacggtatgaaaaaaggggggttaaaaggagaagtaagggaagacggaagacaaaggtagggagaggagaaaggatgacaatgcaaaaagagattgaagagaaatgcgaaaaggctgagtggatcgcctggcggggcggacagaaatggaggggcgtagagcagtggagttgggtggtttgcccttatcgatagaatgctatcggattgttagagagggaaaaaagagaaagagagattgaaagaagaccgtaccttttttataagtttatttctttttgccaaagaaagtcgagtgagttggcaagttcaaggatttaaatctcaaacaaaaaaaaatccatcagtgggccgtggacttaagtggcttttgattgggagagacgtcaccgcatagaatgcctgaggtgtctatttcgccacttgaatttgtgtgatgcgactggacgataacatgggcctatctgagagataacatgcagctagtatttaaatttgtgtatcccccttagattctgtcactgatcctctccaaaacctctcgttcctcggcagaaagcgataccccatcaggcaccgaaacatcaccgcgttctactatcaaccgccgaggaacatcagtcagactatcctcataatgactaccaacactaggtgtttccttttggctggccttttcagcatcccctacaggtggcgctaggggatgtgacgtccaccagtacagcggatatcgacgctggatattgttgagaaccacagccgcagcctgcatcagcgtgactccaagcaacatgaccgggaacagaaaccagcctatagcaacagtctcagagtgcgtcaccgccaggagagcagtcgcaccagccggcggatgtgtagtattggtaagaagcatgaccgccgtggtaagagcgcaagcaagagcgcccccaagttcagtatacgcttcagcacgagggtccaaggcgaacaacttcgatatcccgacaccgaagaaacaggcgatgacctggctcaggatggcattgcgtggttgcgcgaagggcgactcgatcgcgccgaattcaataactgccgccgcaccctattgtcaaagaatcatcgagtcagccatgggttgttcttattccactctgctctcacacattcaggcccgacacgactcacaaaactgccgataatcgctgtcgcatcacgcgcttcaaaagaaggtacccgttttgtaacagatgcgatcaaagccaccccgcaaaacgctccaagcaacgaccacaaagccaccacgatgttgcctattggcttgggtggtctatcccgatatcccagcatatgagcgatgggtcttggtacgagatgccatcttggcgctggcacgaagggattcagataccgatcaatatcgaaattccaggtcgtcgggtgagatagcgtcacgggtccatgcggggatggtgccatgctggaccggtgcaagaggagaatatgctctgggctccggtaggtttactgatgatttcgcagcagcacctaatcccaagaacatatctcactgtggagttcagccctgctggggatataaagaaagcaaccccatccgtatgtgccggtacctcttaggtgagaaatggctcatgtgtgcggcttaagacgcaacccttcactctttctccgcggatgtcaactcgccgatgtctcccagggttgatgtcaggtccaatttcttgtccactcagcggatttgcatttggtaacataaactactatttgggactagcggcttggcataccgtcattgtcggggaactctgacgatatttcctctttcggattggcatcaatacaacatagatgtactccacaacttcagtcttaatgcgactgacatgtattcattgttctggactatccctgaagtgaaataatggactagactgccacacaaaccagctctctctgctattatgatatacccggtaaataacagagcatccatctatactaaagaagcagtaatttgtcttcagcaatatcaatctacaacaaagagaagaatcaaatctcacccccaacatccctcaagcactcttcctccccaatcaccaacggcaaccccacacaccaagcccgcggatactccatcccccatttcgccatcagcgctctaaggtccgcctcatggccagggacaacattgacaaacacccgatcaacatgcgatcgcggctcagaatgcacagcaccctcgtcctctccgacccggaagaaaacacactcccccggagacgcctgcaccatcccatgtccgcccagctcaacggctagctgggctcgcaccgactctgccgccatagcacaccccacacagcgcacggagacacatacatggtctgggtctgcggcacgggcagcagatttggcggcttgttgcgtggcgcgtgctaggcggtttgtagcggatgggatgaacagggttccggggcctaggagggtggttgtgagtttccagtttgttggggtggggcttgtagaggggatttgggccgttggtggtgtaggtgggtgatcatgatgcttggtttgtggtttggagggtgagatttggcctgagagattttgatttgttgttggtcctgtccaggtggatttgagtagattagtgattggcgagaagagcgattcacgtcttgtctgggttattggtggttggaggggagagaagaataaatcgtccgtatgccaacgtggggtgtcgaattcgtccgagcctttgcttgctctgattgtgagccagtagtgggattggttgtttttagtcaggaagtcgtggacataggccaggaaggaggataaggagggcaatattgagccgttgattgtggcatctgcccaggtgttaaaggaggatggcaggttacatgattcgagggtcaagaggggtccgcagtaggtccatgaggatgaagtgttgagggtaattggatcatctgttggttctttagactcgattgaatatttggctggatatgggaagaactgaaactctggtagcgatttgacgtccatcgcaggtaattctaaggtcaagaatctattcctttgagggctatggaacatttgaaaagctcctggaattaatgtgtacaggatgcccatgacaagaggtacccccttacacctgcaggcagctttccatttctattttagtcctcacctcttgccgctttttggtcattgagtaaaactgagcacgctaagacttcgttttcgccatatatagatccaaaccactacccgtggacatacagttcgctgagccccagtgcaattcattttttatccaacatggtcgatttgaatgaccttcgcccaattttctaggctcatcccattgatacctacccagtatactgtcgggttggttgacttgatacccaggttttgcacgtcgtatcttttcaagctcaaaagatcgacagtgatcgtccactgatctattagaaaatggcgttctatatcatctgcagttcgagggatctttccaccagacgctattcagtaatagaagcttccgaggctagagatgggtttctagttttcacatggaaagtgaacaagggtcagtcctgctgcaattgtctgaaatagtcacggaatccattctagtactgatttatccaatttcctctagcgcttagtgaatactaacctgcgtgagattggacgcatccgctagtcactttagccttgtaagagtctgagcgttgtcaatgcgaacatgactgttttgtattccaaacatatttggtagtgaagtagacaatagttgtatgcgaatcctagtaaggctgggcgttgtaacctactgcaggggttggccgtacgttcatacagatgtatctctagaactgggcacatgcactgcgcttagtctaagcgacttgctagcgttgaggtttgacccctttttcaatcattcatggatatcccaatttatgctcgggtataatgtcctatgttacttgacgttgttattgatccccccgcaattttattgcgttttatacaccattttagggtttaaatcgatatttattgctcataaacatgtcctcggggtttctctacgatcaaatacaagcgatcggtcttattgagactgcctgctcgagtcacactactacctaatgtcttccaccttttcagcaccgtcaactgtcacacaaactgtctttcagacagtcacaactcccttcatacaagcaagcagctgcttgtctatatatgacctgatcaccctgtctatactcaggccagctggtggttcctccacgatctcccctgtcgctttcttgatctcggatgctgccaatcctcaattttccgcttgccagcccaacggctggaatgacggtgacgccgcgagccaattccatttcagtccagccgtatgtcccagcgactggacatactatgaaatcagacgcacatcctccaaagctgggaaaggaaacttagatccctattccacggcctactgctgtgctaggtttgtacataaacgtccacgattagtgatatattgtaaacatacctatcactgatcattcactccttttagcggttatcaactatggaatacactcacgtctttcctcacgcctttctatgtcaccagcctcccgacaccctgttaccaatacgtccatgccggctcgacctcaatcacagtatcaatgtcgccatccggcacggagacaacaaagatctttacagaaggatatatagctcacgcagcatgggggatctcttgggcggcatcggacacggcgagcatgtccccagcattaccattgcttgattcggagcaatacattccgacctgggtgccgggacagagcgtcacagctccttcggaaccaaagtctcagaatgactcggcacttacggctttgggatatcttctcatggtgggccttccgcttattggcgtcgcgatcattgcatgtgccgtttggtgttgtttcacgatccgacgggcgaggcgtcgagaggcgccccaattggagcagtggcgattggagcatccgactagtatattcagaactccgcagtagactttgaaaggcttcgtttatggaataatagcagttcggttcagttcatcttcttttccttcctccttccttcatgctcaataaatatttgtctggccaaatcccgtgctgatacctacccagtgagcccagctaagcctaagcatcgtaaaagcggcggcagtttggggcccgtagacagaatacgttgtggatatatatttacagcgaactaaaacatctagactttcagctgctggaatggttgcctttatgtgacaacgctaattattggtctagcaaaggacttcatctaagacttcaatttatattgccttttatcaagtatatcataatcattatttgcatcgacggatcttacaaacccagcttagacgtccaaggtacgtccagagcgagaactctcacgagccaactcgatcaaacgaatgacctcgcgagcctctacaccactagcagggagttcaccctcgccattaagagcgcggacaagcttgcggtagtactcggtgtaggtggggggctccacggtgggaaccacctccttgacgggcttgccgttctggatagtagtcaaagcaccgtaacgctcgctgggctcacgtccgtaacccttatcctggggcatgatgccggccttgagctgatcttcttggatatcgaggtggtactatacaattggtcagtttttgattttcattatatcgcagtaatcagcgcaagtagatgatgctcttaccttcttgaagctacccttgtcaccgcgcacccagaagcgcagctgctcgtcctcggggctgaccacggtcgccttggcggtaaccatagtgccgttggcatagtgcagcagaacggtgaaggagtcctcgtatgaagaggtgttggacgcccgagcggagccaatgaaaccggtcacccgtgcgggtaggccaagcagatgcacggcctgatcgaggaggtgggttccaaggtcatagactgctgagccaccggggatgaccttgttcttccacttgtgagagtcggaggcgggttcctcaggacggtggcggtcgaagtgggtctcatactcggagatgcggcccagagagccgttcttaacgagcttggagagggtcacgaagtcggcatcccagcggcgatctagggcagggattagtatgtgacttttagtaagctaggcggcgggacatactctggaacacggcaagctgtttgttgttgctcttcgcaatggcgatgaggtcatcggcttcctgggtagtgggggtgaagggcttctcgcagacgactgacaaatcccacgttagttcatctatgccaattatcttggacttctagacacttagcacttaccgtgctttccagcctccagcgccagcttgaccagcgcgaagtgagaatcgggggcagtagtgatgatcaccacgtcaattgcggggtcctggaccatctcctcagcagtgcggaaagatttcacaccggggtggtccttctcggcatcatcatcctgcttcggcgtgcgctggacaatggcatagagcttgagctcgggaacctccttcacgaagggaatgtggaagatctttgcgctgaagccgtagccgacaataccgacattgtaagtcttggtagccatgatgagaatacgtgagaattaatttgaaggtaaagaatcaggagagagaaactatttttatatgtccccggaaatcatttggcggggggaacgtgggaaggtcctggcgacggcaactttggctcaggtggggttccaaaccccaaaggccgagtcgggttcccgaagtggcaatgttcgacttttgctatatttcccggagtactctgggcctgattgataatataggaatgttccaaggttcttcttatatttgacatcttggcttctgccgctctacacttccacttgcgtcattggccattcgccatctatccctgcactcccacacacctcgtaacctcgatagcatcctgtcaaattgcagttaacgacactggaagactccttttttcggatggtccaaacctacctccaatccctcgggctggcatagctgactctgatacaccaagttcgggttcccgacaaaatcgaaagtgggcacgtcatctttacccacaaaggactctaccgtgcgctcggccatcccggtagtgttgtatgacttggaaggtccactcttggctgcttcacgtttctgttctaccgtgctgcggacgtattccagatatggcgggttgcccgggtaaatgacattgtcagcagcgagcactgaacccggcacaatagccccgaggtgctcacacagcttgaggtcagtggtgtacgctggtttgtaatgatcgatgaaaagaagttccactttcttcacctcgcccgaggtgagtagtttgtgtagcgacaagtcgcttcgactgacgatgatactcacaaagtctcgcaatccggctagttcgatgagcatattggcaattgcggcgaactctgggttcagctccagactcaagtagcgttcgccaccgtttcgacggactgcctcaccgaacaggattgccgagtagcccacgtagcagccgagctcgatcatggtctttggcttgagttcatcgataagtttggtgacgactttgcccttttcagcgccaacattcataaaatggtagtctttctcaaactcgtgaatcagatcgatcactttttggggatgtccccggatgtcatccagatttggttgcccatagatgtaatgtaggggcttcagctccttgctagtatcgttctagagtatgatttagcgtgattcctcacagtcaaatggtcagaatgcaaccaattcctaccgagggttcttgtagagacatgacgttagtttctaatagagcaagagaagctgataaatgattcaagggattctatgctgacgtgcgaagttataaacgtcatctcgcctcggggatacctcatggagtaagcccgagtagatacccgtggacagccctggggtaaataaaatccgagtccaaccatgcaccattcaccaattatggcgttgatcactatcccgagcctcaaaacacatagatctcggagatatcgctctaagtaattagtaccgagagcactgatacccggaaacctgatcccatgtggtaatcgccggacgttcttcccagccctggaggttagatccgagaacaccgttaaatgcggagaaatttacactgagccatggagatcttcatcttctccagatagatcgagacgtcgactatgtactccgtataagtgtttaatcttgaaagtgtatcgtcacaccgaactagatctgcaggccaagcccctcattagtctccagccccctccaactcacatttccattccctgtcagcgacgatgccctccagggctatactctaggttagccttgtgagtgtgttgttcccaatatttaaattcgaatgagcggatctatctgcttgttgcgatgaaacctagactcagcatgtcggtcaaatccggcaatgcgtccgtctcatcggggactttatcacgagtgttctggcatatccttcgaatatgcctttcattctcgttgttgtttgtcgataatgctattctcgtggtcgcgggtttcctagcttatctccggcaagctaatcgacgccgagaaacacaacggaatgtgcacttttaccccaagacagtccttatcacgggcataggcacggtccacggcctgactctggcaaggtcatgggctgtagaaggtcaccgcgtggttggggccgatgttactgacctagacttgcccgtgcgctccggcgggagcatgtccaaggccctagtcgcattctaccgaattcccaaggaccattacatcccccggctactcgacgttatccaccgcgaaaaggtcgacctgtggattccacgctcgcccaaggcatcctccattgaagatgcgacggcccggcaggtcgttgagagtcgcactagttgcaagtgtatcacctttgacaccgaggtggcggcttgtttcgtccatcctgattccttcaggcagtatgtggtcggcagaggtcttcctgtgcttgagtaccacagggttcaatcgtgtgactctgtgcacaagatcttgcaccggtcgccctccaaaacctaccagatctcccgagcgaccccatctgcgaatgagaaggttatgctcttgccgaggcgcacactgagcaagacatacacggtgatcagcgagatccagatctccaaagatcgaccctggattctgcagcaacaatctcgccttggtgagctatttgcagacttactgattgtgcgtggccaggttcaagccacgaacgttcggctttcggattctggttcgtctacatggggtgcctcgcgtctagatgagtctttggccgcttcggtccataaactcatgcagaaattggcagctacaggtggtgttcgcttgacgggccatctctctgtccgacttatggtcgatgaagagtttgatacgcattctgtccggcacactatctacatcgccggctgtacacctggtgccagagctgtggataatctgctgtataatgtaccttgccccattgcaggttatctatctatgttcccttccaatccagccgacgcagccaaagtcgcagcaacactatcatcaacccgtccaatgccaacatttacccgagccgccattcttcccgctgctttcatgcagttttcgttatttcactttgcactcacaactcttgaagttgcagaggcagaactagtgaggctgctgttctggaaagaccccctgttctcttttcttgatccgtttccctggtggtgggaagtacatgtctatcagccattgcgagagatctgggtgttgatgaaacaaacacgagaggcgggattgggttgatttccctttatgttagtatgagtatacgagaaatgagacgatgtaaattgacaggcatacgccaagaagagtgtggcggagttcccgaaatagtaacgggctgtcgcctgggcagcggattgtggaggacatacgtatgctcggtggaaacaagaggcaggataaggcagagaaacaaatcgatcgtcggatttaatattaatattgaactctcaatttacatatctctgctgtcctgattcaaataatcgcagaggcgcgacattgcgacggagaattaatcaaaacaaaacaaaccgacaacttttctccacggagcctcagcgtggccaagaccctcccaggtctcattcttcaggtctcgactctgttcttgtctcatctctcacctttcgtctgccgtatgacttcacgataaactacacactccgagaccaacccctcccttccctccgggccaatacaaaaagcgcaacacccttgcagcgcccctacatacaagatgaagtttcaaatgccgtcaggcggaagcctcggacggacgaaaaatatactacatttcatacaaggattcaccatcttcctcgcatgggccttaaccatcgctatctggaccaaaggagacggcatcgatggacgcacaggctggtactggggtctggtgagttttctgttcctgagtttctgatatgaaaaagctctcttttattctgacgtacgaccgaatggcagtgctggttgagcattcccggcctggtctacctggtggcagtgccgatgtggccacgagcccgacgattcggtaacgtctatgccttcgccagtgtcgacatcctctattcgattctctggctcagtgcttggatctgtcttgcttcctatgtcgcccaaggaaagtccaagggttcgagcagtgacaacgacaagtccaactccgattccaagtccaccgccaggagagccaacgccgacagtgacagtgacaagagcaccaagaccggatgcgataactgggcctacggaagcgcttccaagtgtaagctgagcgaggcgactacaattatcggcgttttcatcttgtacgtgaaatcccctctaactgcgagatccagcgattcctcgaatgaaactaacagacaaaaagcgtcctcttcgccatcaccgcctggatgtccttccgcaacgtgatgcacttccgccgcaccggcaccctccccgacgccgtctccgatcccactttcgccgcgcagagcaaagccgccttctcgtcgaacccagcccacgacttcgaggaggatgacgacgacatgcgctccggccgaggcggcggcatgggcgcctcctcccgcggcgatcgggacgaggactatgcccttctgcaccagagtgaggtggatgacctgagcaacgcacacggccggaccgcgatgcaaggctcctacgaccccaccgctcccgctcccgggggcatcctccacgattataacaacacctcctacggtggtgcgcatggccagcactacacggagccgtctacccagtacaatccgtcggattacactccgtctgagtacactgctcccactgggtttggcggctcatcggtgagtggctacggaagacggcccagttgagtaaatgatgttaccggtgtacatggagacattgcttagtgaaatacccggaggatggatgagtcgtcttacttttttgcgccttggatattgaccatggaagcggtgttgggcgcatcgctgtttactctgggctgatgcccttgtctttaccatgtttttcgagggtcttttaaccctgggatgatgattgtatgtcctgtttttgtttcattggatctagcaaaatatagatgtattgcattgaaaaatgaagtgccccgacttgctttgtaggttagaatgcctcggttgactaccaacatatatagatgatatcctgaaggctgagatcttgtcaatctcttttggggagcttggagccaggctacactcacctctttaccattgtatcatgttaattgccttcaatgttctcaccttgaatgttgctcatagaaggaaaagatataactagatagcaaaaggaactagtattctgccaccgctttccatatcagtgagtttatggacagcttgccctcttgccatcatcatctcttgacaagaacaactccggattttgacctcaaagtgaattttgtcttgtgggacagctaacagtacgtcttgaactgtacctcgtatgaatttacccatcctcccatcaaaccttgccattccatcccctaaacaccgcctagtcacaccgcagcgcatatactagcacacatactaacaatctcaagaagcacaccgaccatacaaaccaaaccacgagacctacagtctccccagccccaaaaatggccagtgaaatcgacatctacaaccaatacccattgtacatggaccccagcaccaaagcgctctcactcccaccctcatccgcccaaacaccctcccaagcagccgcaatcaacaccgaactggaagaactgaaccaactacaccgcgccctaatcagcctcgacccacccaacatcccacccgcgcccctccccttaaaccccaagcgcagcgcgcaaatcagcaaactccgcgacagcgccaacgccgcccaccgcaaatccaactacgaagaggcaatcaagctgtactcttacgccatcgatatggccctcagccggccgggctgggaacctgtgggcgttgcgcgggaggagttggcgggtctttatgcgaaccgcgcgcaggcgcacatggctctgcaggcctggcccgaggcgctggttgatgccaagtctagtgtcgactcgaagcccattgggaatgttaaggcttggtggcggattgctaaatgtcttgcggagatgagtcgctatgaggaggcgcgcaagttcttgcataaggcgcttgatattgaagggaaggagtcggagggtgggaaggagttgttcgccttgctgggggaggttgatagggctttgttgcggggattgtcggcctagagttgctctcttcctgtgttttgtttctgcgcagctgcgcttttctttgtttctgcatgttgactagacgttttgtcgaggcttttatggtttatttggttctcactgcatgattccctccctgttgggatgtttcgaggcgtttatgcgttgttgacgaggtttacattgatattgtatatctctggatttacgtgctttcctatcaaaagacattgcaacatacggctttcctccttctcattttctctttcttctttagagtgagcgtagttcaaacaggcgcgaaatatcgacgagaaagcgaaaaagtggccccaatggctaacatctacgctctgtagccagataccataattgcccgcaattacttggtagactaaagccgtacaagtcgtaaagtagaccaagaattaataatccatctcgtttgctaaacagctgtaatttatatacaaaaagtggagcggagaacataaacaacccaaacgttagatctcatcaaatcaaaccaacacgcttgacccatcactctccttgcaggcacaagcgcccgcgttagcagcaacctgtgtcggtgtgcgcgcaaagctcggaggcacatcaagaactgggctgcggtcaaagaagttgcgcgggcgcagaagaagtgtcatcggctccgcaggcatgatagggtagtcctctggcgacgggaagtgcgtcagaccgaaagtgtgccagagaacgacatcggtgttatcaatagagcaactgggaccagcagcttcgatccacgcgggcagaccctccgagggctcgccggatgtctgtgggacgtggcggccagctggatggacttgatcgtcgtcatctgaagaaccgggtcagttaatgaacacgacatagaaaagagaaatgataaaactcacatttagtaacatgaacggcgtggcgcgcgaatcctgctcgcttccagaccagtccgccggccttggggagcaggggaggaacatcacggctgactagcttgtagctgacgggcttcttgctgtatgggttgagcttgttggtattcgccatgtcccaggtacggctggtagatccgtcatagtcggacatggcctcgagcggcgtggagaactttgtctttttggcatagaaggcgttgccgtacttgttctcggggctgccaacttcaccgggtccttgaactgcatctacctggaagactgtattgctcggcccgtcgatgttcgggtctacacgaagacagaacaggtgctggtggttgtgggcgttgacgccggggtacacctcggttccccagcccttggtattctcgcctgggttcatggcgtaggtgttgaggatgccggtcagcttgatctcgagctggactgtgccgtcctggtggaagatccagtacacgcagtactcgtagtttgccgcggtgaagatctgcgaaatgatgagctttcggccgcgggttacgaccatcgactcgtcacggaaatcggtgtgcttgaataggatgccggcgtcttcttcgtggatgcagattgcgttcttgatgattgtgctagcgccagctcggttcacgaatgctgcgtccatgtagtggattgcgcccttgcagtcgcatccgagtgtcaagctgttggtcatgtatccgccgccgtactcgcctaggtcgaatgcgtgcttgcgctggtggggatgttccgggttgccgtatggcacgaccatctcggccagagaaagacgccagaaaacagggcgcacattgcccttgtcgttgaaggtgatgttgttcaggacaatgccttcacggtagttgaagccgacgtggatgttccaattctgccattcgattgttcgtcccttgacctcgaaggacacaccctctggctgggtgatgtggattggcttgagatcggtccggtatccaccttcttgctcgactgcggccgggtggtagttgtttggagcggccttgctaactggtctccgcacaggcggcacatcaatgtggatgatctgcttggtttcggagttgtagatgggacagaagtccaagggataggtgtactgagagtcgtccgggtgagggcggtagtacatgagggcttgctgaagacgaacgccggtcccgaaacgctcatcatatccaattgtccatgctaggatgccatttgatcagtattaatcttcgataaacgaggaaagttcgtccacttacggtcacagtatactttgtgcatatcctccttgggaattccaataataccacattgctcaataaccttagcatccttgcggacaatatgttcaacctcctgcaaatcctccatggtgatgagaggctgaacattcggtgtgtgctgccacttgatgatcttcctctggtccaggtcaaccacaccatcgtagatcttgccgccaggcgcaatggcaacaatatcagcggctcgggcaggacgaggcgcattctccggatcagccacccaggccatcatctgagccttgcggggctcatatagagtgaccgcattgaagttgagcgagccatgttctttgcggataatactaacagcagcatcaatttccactgtagaaagaggatcaagtggatgaggtggcggcgcagtagcgctgacttggtgagtcaattgttgtagtcggtcgagcaccatactgtgctagaagtatatagaaggagatgacttcaatatgatgaggttaaagcgccaagtcaggtaagtagtcgctagagagtcaaatgcaatagactcacttgattctccctcatgcccgggcctgcggactatttaacaagcaagaggtatctcgatatgtccctagccctgcaggtatacctcgatccgattagataaagcctatttgcggaggccggatccaatgacctgattggggttagcgtggtatctccaaccccaaaacggcaaagagatgcttgtctgcagcttgatgttggtataatctgtgttattcatgtcgtttgtcacatcgcggggtagaatcagagatgtcgcatgacaatgctcaattgagaacgtgtgcttaagctcaatggcggtctggagctgcgggccttgccttgtcatccgagaggatatgtagatacgtcgagcagatcccataagatgatacggagtagaccggaacaacctaggagctcttggatttacaaagccaggccaaattgaccgaacagaaaccagaattcctatacataggacacagacaggtccgatctagctacaacaagaaaggaagaaagaaaaagcgtctagatcacaagaacgaaaggcacgaggccatactagagcctgtaaacgcctcgtaaatggattcaaaaccaaccatatcaaacgccaggcaccctcctgcccaacaccgtcgtccagacgcaagaactcggcacaggcaacgaagcctacgcaaagccataagcgtgaagacaatgccgaatatcgaaggaaaagaacacgattctcgtgtctatgtacatacatcatatcatatcaaccccaggtgcttcggggactgtgcctcatacccggcccatttgataggctccgggagtcggggcattgtagccagctccgtagtgctgaggtgtgtgggcgccagccccgtgagacccagtattgggagtgctgggggtgccgcccgagtaaatggtcgcgccattaaggttgggcgtttgctgagccatgttgtaggccactgcaggcatttgtccgttgagaccccagatttggccagaatatttgctgtcgtcaattgcccctccgaaaatgagttggcgcgtcttccagtagatctcgccggtgactagggagtctgagccagcctggtgagcgattccgacgcgcttcacgccaagttcatcggcaatgtcttgcaaaccagatttctggcctagattggtgagaatctgggctgcagcctgactgagaggggaaccgttgacggcttggttgcgaccggcgtgcttcatgaggtatttgatgtcgtaaagtgacgggaagaagatggtaagaagcttgtggaactcctcttcgttttctggaagctgggagcagagcatgatcttcatcaagtagccaaagtcgtacccggagtggaaagacacccagtgaacgtcatccagtagcaccaatccagagctaatcaaaagagcaccgaattcgaaaggatcaatgccgttcttttcatgcatggcgaagtcaattccagatttggcaagcatggctgttgactcctgggcgtacatgtcgccttcaagtgaaaatcggaagttgaactgccatgtgcagggagcgggcacaccatacgcttgtccattggcatcagtgcctgaggctggggggacctctccttcgtcattgaataacgtgatgcctagttgtatcatcttcagaagatcaacattgcatcggagggtctgataatggtaatcggctttgttcgaaaaagaccctatcggccgagcaacaataccagggaactcggtgtcctaggccctagtcagtaaacgttactcatagaagatttccgtttcgcacggagacaccacatagttggtgcttaccatgctgatgtaagggtacttgtcgaccaactgcctcagcaccgccatctcatgggccaggttgtgcttccagacatctctaattcttgacttcactgcaccgccctttgcttcgagcgctaaccgaccgtcgtgaccctggtgtagttgctgttgttgcatttgcgcaccgcgcgcgaatcccatctgtgccgcatgactagccagaccggtgccgccgccatcacctgcaccagctcccgggaagccggctaccgccataccatttgcaattccgccggatagtgtaaaagggttgatgttggtattcggattgcccgcgaaaccaggatgaccaagcgaagggggagggagtgtgtttccggactgtgcgtgtgcgggatgttgagattgaaggtgagcttgttgtatgttgtatggagcgtttaagccagatggcgcatatctgccgacgggaggtggcattttgttgtctcgaggatgcgcatggatgaagtgacagtttcgtccctcgaaggcgggagagctacttggtctaccgtattcggctagcgcgggtaattgccaagcacacctcttttcctcaacttcggctcctcactgtgtcactttgcggttgattgcggactaagggaccaagttacagcccttcacatcttgtttcactttatttccgtctctcagtcataacttactaccggacaattcccacaatgtccgcccgcaaccccaccggtttcgacatcgcccagttcaaggccgcggcctccccatcctccgtctgggccaagcgggatccatgggctcgcaagtacgtcaagtgatgccgatatcatgccaattgtgctaggcactaatgtttttacagtgaggcgtggcgctacaccggccccttcagcagagccgcccgcttcaagggtctcttccccggcttcggtatcgcgactgtcgctttcgctgcctactgcacatacgagcacttcttcatgaaggatgatcaccaccacggcgatgctcaccacggtgacggtcaccactaaaaggttgtctctggagaccaattgagaatgccgccgaccgatggatcatcgagcggaggacgtataccccaggcgacaaaaaagagtcgtctcgcctccacgataaccacagcctttggattatagagcctacagctttgccgggtccgggagcttttgtcgtgtcagggcggatatgcagcttctcatggctcatagggagcgtagcttccagatggcgctttgggtttgatttgtcgaatgtacatagcttttgttccactactacaaccagatatttctttattgttcgatcgacgactccactggcttgccgtgctatgttatgagctggttatcaaggtagggttggctttaagcttctataaacacgtaatatcattatcgacatgaacccccactatacatgttcgggacgttcaactttttgttttatgcggattactcctcaaataccagtgagataccatcatcaccggcagtgacaatacgttttccatccaagccctgcacaaagcccatgatgccacctgcttgctcgccctcgtcattttccgtggcacccatgtgtcccttccactcccgcatcaatccttgagaagcagcggccgtgccaccacgtgcgtcccaacgtcggaccacaccgtctagaccgacagacgtgagcatccaagagcggttctggtgggctgcggaagcattggcaagggggcctgagacacttgcgccgagtttcttgctgctaggcaagaattcaaccttgacaacagcgcttccttcgtgggcatccctgatatgccgacggaccgcaaaacgatgagccgcatcgtacataacgaccgaaccatccacagacccagcagcaagaagggtgaacggagcctgggagaatgagagtgactcaatgttgtctgtttgagtctgtaatgctgccatgatagtgcctgcagcggtggagccggctgcctgggcgggtgcgcctttgcccttacccttggctgccggggcacttgctgtgacccgaggaaggccgacaactctaatgttgccctcagcaccaccaactgcagcaataccgccgctgggggagatggcaatggtgtaaagaccaccctcaacggcgaagcgctgatcctccgcattcaatccaaggatggcgttggtacctggggagtactcgatgccagcggcggcagcagctccaaagacgtcgtaaacaaagaagctggcgtcctcagaaacagtcgccagcagattgccatcaggcgtccatgcgcctgcagtgcatgattcggtgtgggagaagaaggtctggatgatagagataggttgcccggggtcggtgtgatcgatacggaagacccacgcactgccgtcattggcaccgatggctataacattttgcgtcgcttcatttccttgctggtaggggcacacggccatccaattgatctcttccacttcctggacctcgccaacgaactcccatgcaagtcctgtcttctgaggtgtggtatcccgataagctcgcagcttgccatccagaccagccgtaatggcatattctcctgccggctcagtgaaagccacggcattcacggtgtcagtgtgtccgtcgagcttggccagaggcatgagagactcgcgctctttgggctgagggtttgactcatagctcgatgggagcacaggacgcggtgcgggggtcgagtcaaagatgtagcctgtgtcatcgccggaacccgtcatgacaatgttgttgtgaaccgggtgctgcgcaacacagaagacagagtctgagtgggagtcgaagtgtgccgatgagtcgttttggaaggtgatctcatcttcgatggtcatgttttcgtcgtcgtattctccctctccatccgacatatggtgatcctcatcacgatcaaagatctcttcggcatcatcggcctggatatactcctctgcattctcacgatgcgggtcggttgaagacatttttatttttcaatgggtcggagatgggggctgaacgatatgatgctgaaaagagtggtttatgaacagtcactctttatatgatctgttcctaaacaatattgaagcaaagaagcaggttggtaaggcaactcaaaatgccctcgatcttttttcttacctccccgcttagaaatccaccaccccgcggcagattatgctctgtcccttaccgccttagtgaccgctttggtatcagcgcgaaacgcgaaatagcatggcgttttctgcgaatatatggccacagtcctggttgtagattgtttaattgcaaattgcattgattcttttgatctatcctggtgtttcaaagcgtgaagaagctatggaccccttgcaggagcctttcccatgcgagcaatgtgacaaggtattcgggcataaacaccatcggaagcgccatatcctcctaactcatccgcaattcaatattacttgtgaccggtgtggcacagctctcacgcagcaatgctatgaccggggacactccttttcgaaaaaggtttaatgccgcttttgtccaaagtcctatagtcgaaggtatatcatagtctctacgttggggtcactttcctattcatgcctatctgaccagacaatcgatgatttcgacatgcccagacatcttcgtcccagacttacatgtcaatgagactaagattggtagtaaataatactatcaaacaagctacaatatttaaaaaagaatgaactagctaccgatggacctacatactcttctgataacagcagatgagatgccttgtttatcacgtatttacatatatacttctagttcaagccaacaatggttatcggtttccaagtttcccagaccaagttctaatcaaagctacccccgacatttttagatcttgctaccagcctttctccgtgcctccttctcttggtcacggatcaaccgacgaagaatcttaccactcgggctcttgggaatggcatccacaaatctgatacctcccttcaaccacttgtgacgagccttgtggtcctcaacatacttcacgagagcctgggagacagattcgtccgatcctgcgctggcggacttcacaacaatggccttgggtacttctcctgcacgatcatccggaatagcgatgacagcacagtccgagacatcggggtgggcgaggatatgggcttcgagttcggcaggcgcgacttgcagaccctaggaatgacgtattagattgcgaatattcccatcagccgatgcgatcacgaaccttgaccttgatcaactccttgatccgatcgacaataaacacgtgctcgatgcccttcgggcttctacggatgacagcctcgtctcccgtacgcatccatccgtccacaaatgtctctgcggtggctttttcgttgttcaaatagcccaggacgacgcttgggcttcggaccaccaattcgcccggtgagtcgtacgttgtgatttccttgttttcaggcgtcacaattcgtgcctcgactccagggagcaaagcgccggatgaacctagccagatatcgtgcgggtgggtcgagcttacgaccgtgcatgtctctgtcagacctgtgcgcaaatctgtcagtgctgcgcaggttagaagcatcgattaccacgtaccgtatccttggcggatcaaaatgttcgggtagagtttgaggaaatcggcagctgtctccatacccaggggtgccgctcccgtgaacagagacgtcacggaactcaggtcatacttggagcacacgtcttgagtgcccagcatgtgaatgatgatcggaggtacctaagtccttgcggttagtattcgacggccccttctcatcgggaaagacatgctcaccaggaacagcgcactgatcttgtactgttggatggcgttcaggtaggatttcaattcgaatttggggagaacgattgtttggtcgcctcggtatgccccagcatggccaatgaccacaagagcatagatatggctctgcggaaggagaccaagagcaacctcagtactcgcaggctttgtgcccccaccatcccggtagttctgctcaaacgccttgatctgaagggtattggcgatcacgttgcggtgtgagatcatgactcctttctgttttgcagcacattgttagcgaaagtgacattcaaattgtcaggacactgcttaccggcaatccagacgttccacttgagtagcacacaaatgctgttcgccgggcaccttcacccgcgctccatcgcaattcatccactggcgggagagacttcccagcctgggtcagttcggaaacggacttgtatcctgctggaggcttgactccgccaagaagctgctcaggtacatcgagtaagtagattctgttcttcgggagaccagctttggctgcagcttccagtgagatggagaggagaggaacacaagtcacaagggccttggccttggaatcaagcagctgatgcgtcagctcggcggcggagtatgatgcgttggcgggagtgagaacaccgcccagtctgtgaacggcccagaataggggtaaggaatcgatctaatcgggaaaacgaaagaataagcgccctgccattcttcttgatacagtatactccacctacagtgttgagggcaaacacggccaatgtcttatcccattctgacccttcattcggcgcccaaccaaattcctttgatagactacgagccagcgagtcgacgcgattggctacctctttcgacgagtatgacttcccggtaataccacaggtgtatgggtcccgggagctggcgtgtcgcactcgtccatatctctcattgagcataaactcgctgattggaatattgtcgggaattgggtccaattgaccggactcctttggaggtaaaaaaaccattttcccaaatcctcggggtaatataggggcaggtctccaaagtgcaggaaactgaggtgatctcggcttttttttgaacgtggttagctgcagccaggtgaacacaatggatttttactcacggtttagagcggcagtaagcaaggggttggagacacgcgggcaataaccagctgaggggagatttatgacaagtgacgggtgcggggaaatcggcaaaccaggcgaggacccccaacgatcataccgctagtacctaggtaggtaccgagtatattgtagcttcttgcgtttaaccgaaattgggtagccggcctaaatttgcgaccttggtctcggtggatatcctgcgtgcactgcgtgcactgcgtgctgagcagctcattgttggcggcgattatgctgccaagaccagagatgcctcggtctagacatatccgagggtatgatcgacgacatgctgcatctaatgtcaagttcaatttgcctcgcactgggaatttgatcagacttgcgataaattgaacggatttatcccgagaaatcgagggatcactgtctcctaaactccaatgaaaagcagaatgctcgcagcatttaaagtggccttggcatgcagatcactcaatctccattcgtccccattcgctcggcttacccgttttagactgtgccgaatatcttcgactacaccaacacctcgttgtctgaagccatatacgtatagaatgacatgacagcttggtacatttgggtaatgagtgtgctcaaggtcactacgcctacttaataatgtttcaacatctgtacgtataggaaaaacaggacgaatggactgtaaatgtattcagtgactacctctacctaggtgactagctgtataatggaagaggatgtgattaacaccccccatgtattccgtgggactcgtcaagtgactatcgagcccgaaggctcagccacgactttgtcaaagaacttccacgagaaagaccggtttgtttttggtgtagacctatatggacctcaacaaccttggtaatgttgacgtctctatgtataggtgatgcacggccctgtgcctcgcctgtactatctccgggggctacggggagatagtgggcgagagggctgagagaaagaagggaagaagaagagaagaggaagaaaagtaggaggaggccttttatacccccaagaacacgtaccttcccaaagtgcccagttcccttgcaccttccctgattgtcaatgtcatcttggctggcgtcgaagcagaattttccaacgtggtgtgagctgtcgggtagataaactgggaacatccggctgggatgtatctgcgtgtcacggattctagcaagtgaggactctcgttcacttcatctgacaagcatgtaaacttgtgctgttgatttaattttgcgatttatcttgcttccaaagttcgaaagggggagggaagtcattgatattgacagacagcaggcgacatcgattggtctgcgctgagcctggcaggtatcccccgttggcagtagataaatctagcaattacactctttcaggatcagactctccttgtcgtggcctcccaggtaacatacagtatccactgccctcagggccatagtctcatcgtcccatggagataactatccccattgtcctcgggtgtgctatagatgggtctcatatgagttgatatcgcagtattcaagagaaatcataagccttgggccagatttgcccttacaacactcatttcccggtatccatgaactgtccaattgaactaaacagacaagactagttgctggggtccaattgatcttactcacttccataccctaccctgggcattttaattggaggatcaaggaacgggttttgtccgtccccgtacaagaagtcatcaacctcctttccaatccatctcgcacgccctggaagagagatatcttggttgcagccgacagtcacatttcgctgtcgatctgaccagagacggctttcccggatttcctcgcgcatcttcgcaaggaaagaatgccagtaatttccgttgtccaagaatgttaagaaacttaatttcacagatcgcacagttgcagggagctctgaaaggaacgatatcacgtcggattcgctgactatcaatcgtgatagctcaaagtgttggagtttaggccagttctcaatggggaatatgtccttcaggggcacaggcgtgacgtcgtgcagattcttgtgttcgttttcggcgtcaattcctgtggtggctaggctgagttcttccagatcgcctgcttcgcgtaatatatcatggagcttttcatgggggaatgattgccatgttccggcgagagtgaaagaaggtccgaggtgatgagagcccggtttcttaagcagtgtggccaagtgattatattcctcacaggtatcatcaagaatcgtgcagttaattcccgtgcgaagtagacgggaatctacactgaactcgacgacatcattcttttcttcagcgagcgtgcgtgccacgatttatcatttagatcgcatagatgatatgtgtgtgagcgcaggggttaagctagtataacttctaccccattctcccgacctgaatccaatcgaagaattctttgccgaactcaaggcctttattaagggtaactggcaagtctatgaagaggatcctagccaaggtttcgacgattttcttgatcggtgcattgatgttgttggtgagacggagcagagtgctaagggccattttagacacgcaggtctaatggtggatgattgctattgatcgcatgtcaagcaaatagttattgtaactgtttctctaatgctatctatttactatatctagatcatcttttgagtgatatatcagtgatgtatctttatattggatcatatctgaaaaactatgcttggcgttgtatccttgttgtatcattgattcttggggatgaaagaagtagacttttagacaattcgtgctttatcactaagatggcttattacctctcgttctttattcaagttgcttccaaggttgactgatgaatagtcatgagagaatgagtggtttaagagcgataccccgtaagctgactctgagcgccctcataaaagcggcagccaagataggaaagtcccacccggcatagaaaaaaacactacgtagacgtgcctaggtacctaggtagcgaggtggctgggcctcgtgggttaggtgctctcatggtgttatcaatctcggggtttctcggtggtgtccatctcatgccacactaacataattccattgcttgtaattcgaagttcataatgggcaatccatggactccctcgagattagctcatgtgatgtccaagtttactgccggcttgaccccgacctcgatgccgctctggcaaaatatatcttgggtcctcccccagctccataatcctcccacctcacacttcatcccgtcctcaaacgcttttcatccatttcaagcattgaatgattattcgaagctaagtactgtctgaaatattatactgagaacagctaaaataccaattcaccttgtgtggtgccattgggccctctatactgtgagtctgactatcaatctccaccagcagatttaattttgttggctgtttaaatatgttctgggctatgtctggatataatacttactcaatctacgggagaatagcttgattgcacagcaaattgtggaaaatggcaccacgccctactgccaatcgtcgccaggcggttgaaagaccagtgcgagcaagccgcatcgccaagacaaagaaggaacaagccatcaaaggtgacaatcactttgttacatctttatcacgggatataacatgctgataccatacagtcccatcggaccagcttgaagctgctgtcaatgaccaagttcttgagccggtttatgggacacccccggcctggtccgaggtattttactaataatccatggtaatttatatgtatatgtactgaagaatctgccagggtcgtcagcaactttgtgatgcgattccgtggtttcgctgcactcaaggtgcaatgtatcacaatgaaggtttctgctatggcttcctcattgatgctgatggtggtacccgcacttatattgacgaggaagtcataattaccagaatgtaagtatcgtgtgtccggagttgtaacctgtctctactaacctttgtcagcggcggatgctgcaccaaagactcggggggaaacctgaccctcgaaaggaaccaagacccggacaatgcacttgtccaaagtatcattgccagtcaaaaatcaaagcttgctgttggccttgttattggtaattcatcaagagtgctataaaaggaaacctgctgaccacagttatagggagcaggaacaaggttctcaaccgagagcttccgcatcggtacaacattatggactggttccgtgttaccaatgtctggtttgaaaagattggccagaaacacggagtgaaggtccgctttgagaaactgaatctggccgagaagagctggtgggcggccaaggactctctccctccagtgcccctcgatgaacgggactttgaaacaaagcctgagactctcaagtgtgagagctgctccacggaaagtgttcgcttgtacgaggaggggtggatgtgccttgaccctggttgcgtcgacttctggaagatcgggaacgcttcccctcccgctgagctcactttcaatcttgatttcctgagctttcgcagtcgtccagacccggcaattcagccgcactacagtctagtgcccaatcttctgtccacgttggatgagaacgccgcggatgttagcacatctcgtatcgcatggaagggaatcgtctgccctatgtgttccaaatgtatccgtcgaactttctggcaaggctggaaatgcgacgatgactctatcggcgaggagtcctcaaacagctgcccgtttcagaagttcatgaacatgaaccctgtttcgctccgggttgtcctcgatcatttcgaactggccccgatcaagcgagcaattgtttttgaccggaagttcagcattccagagattgacgacaataccttcttcccgtaccggaagctgacttacaaactcgatggagttggctcgattacccactttgtgtccaacaaagcaatcaatagccgtgcgaatggaccagatgaccttttcatcaatctccaacgtggtgatcttggtctcaaacgattccgactccagtccagcctaggtaagtgagccggatacaacttcagatatagtttctcacaatggaacagttgcgggtacactgacctcacatttcgccgtcaactacgtaagtgaagagatactaccttgacatttccgtgtccactgaccaaaggatacagggtatgccctacaaatatgtggtgtctgtcgattccaagggcttcgatgaagcacccaacgacatgctccaagctctgggtcgcttgtcgtgggcaactgaaaaagcagtcgtctcttctggagacaaatacttgcctccaaacgagttgctaacactcggttatttcgaagaaatgaagatcggagtaagtcagatctatgacattgacaacggcctaagctaaaatatcttccatcagttccatgatgacggcgagtcttcgcttggccccagtatcgccacactgtcccttggagcgaaagcaaccatgttcgtccgtatgaagtacaagtatttcaacggctctacccgaagggctgagcccaagcagattgggacccttctgcaagatgaccctgttctaaaagactgcatgtttgagaacgaacggcggacactgaaagaagagttcgatgccggcgagatctcacaagatgagtatgacgactcgcgtcgtgctctgtcgatgggccgcaagggaaaagaggcaccggttaccatcaagatggaacttcatcatggtgatctggttgtcatgcacggagagtatctccagaaatactatgaggtttgggattgttcccctctttaccaacattgagcatcggatctgaccgctatagcattccgtggtgcccgagaacaagttgcgctttgctttgaccgcgagatacgtcaagcccgaccatattgacgcgaaagagattcagaaaggccacttctcactcacacccgaccaaatctacgatggaaagtgatattactatttgccgagtgacacgatttcgaacatctttcccagttctgccttcccatcttgccaactctgattgctgatttgtatgacttgagtaccaggacgttatttatatctatcatggtacttagtgccgggcttaactttccacatctgttacgaatatctctatgatatgcccaggtcatggtttgctgcttctttttttttcttgctatataccctactgcctatattctttgttgcgtggttttaggagatatactcgcgcagaagatcactcgacggctactgccgtgctatcaaatattatagtttatttctgcttttcgagcccaggaggctttcttagaatggtgatctcaatttctgtgtaaggtagatacgtttgatgccacttaagaaagagcgaatttagttcttccggcttcacctggacgctcaattcgatcgacccatcaatgcgacatgcctcgactttacaaaaggacgcagttgtcggtaataaatatcaaaaacttgctgaaatgaaacgaatactagtcaactcacctaccgaactgcctattaataggcagtctccacataattccccggttcggtcggagtgccgaccgaaacaggaaagcagatctgaatactctcactaagcggcaccgcagcctccgcaagccccgagcgatgttggaaatgctgaaaagtcatgttccctcctactagggcatattaattcgaagtgattgcgaattacctaatgaatgatcaaatgaatgacaatgtgctgcgagctgtgagtgccgtcacatggcttttgggattcgcatactgatgatgatattagtgtgacctttgctactcgagaaaggttaaagggcttcgtccaatctatttactgctcggcgactgatatcttttaataggttcgctgtgataggcagctagattgtgccaattgtacggatgcaggcgtgaagtgtagtcgtacaagagctcaacgacctcaccgacaaccatcggtgtatgtttccatatgaatccatcttacttttcctttatgcttacggggcttaatagtatatctgccctcggggaaaaattgttaaccttggaaaggacagtttcagagtatgattgccattcttcttctttacatcgggactccagttgattgacccatagtgaaagtctcatttcatcaaatggtgcagatcccaacaatagagatacgccatcgagaaaaaggagactagatgatgcctggtgcatagaaggggcttcccaatctgcccagaatgagtgtgccgttggcccgacgacacaccatgcagagaaggccagagtcgtcatacaaggagagcttgatggaaatgaacgaatggactgtgaacgaaaggcaatcctcaggtctgccctccaatttgtggatattacgggccagaggagaacctcagttaccgataagtcttcgccgctagaagtggcgtatgaagattttcaacatgatggaccatttattgccccgtcgccggagctgctttatatgcttcttccaggtagtagcattcattttcattgtcaatacatacactaatagatatacagacccaacagctgctgtcggacaatctagttccgtacaatggccggaccacatctcggataaaacactagagaagatggcttcgactattctcagcgacgatggccttgagcatggacaggtattctaccagtattgtatatgcgtttacgtgaaggccatattccatctcttccggaaaccgaaagcatataaggatcctcgcatcaacgcacaatttctgaagtccaagaaattatatgaaacatatgccttccgcgctctcaagaggctcaatttcctgaatgccccaactattcccttcattcagtcgttgatatctgctgtatgtcatcaagcttccttcttcggaaactcttttattgacaagtattgaacaggcatccttcatgcggtatcttggcaacatgagccaatcgtggattctcaactcatacgcagctcgtctgattactgctctgggctaccatgaaattcgcaatccgcttgggatttcaagcctcgatgaagaaatccatagcgctgtatgttggtgcttttaccttgaccgaactctaagcacccttctgtatcgaccactgtcgttgccagagcctcgcatctctcccgcgaacttgatcagtgccgaccaatctacggcacatatcccattaatacgcatattgttcgatttagctcaggtccaaggggagctgctggattgcggcaatgcggataatactcgccaaataattgccaaccactcaagaccccaagaacgaatggaagcaatacattcgacattacaatcggtgagtttgactgaatgcctgtctttctccaagctaacctattctcttagagtcgagcctcagcacccgactgtatcgctgcggattggattgcaggtgaattttgttattacgcgattctggttgatattcttcgatcacgcttaaaatgtaccttttctcctttgacacacagggagtgtttgtcgtattcccgcaaatctctcagggcactgcatcaccttcagaagaatctcgcggatacccctggcttcgtggatccttatccatcattcctaacatggttagttaatctattcccagcgtcatcagtttttccactgatatctcttcatcgtctgcaggactgttcttctatatcccttaagtccgttcttcgtcctcttctgtaacatcattggagaactagacatggatgactacaatctaatgcaagacatcacgacaagtctatctcagtttgccgcaagtccatacatctcgaaactgctgaaactgctgcactacttgcaggatctctgcgtaccattgattcaagccaagcagcgcatgggcccgcaggtcaaagtccctactctgtacccttcaatgactgggacttggcacgaccatccggctagtactgatgagcatgcgcatgtcttgataaatggttcttcatgcactgatcctgtcactggaggaaaccctcagcaatggcagacgcccagtgatggaagttatgcacctgatgatgccttgatgtggcaattgtttaatagccaggtctcgctggagtggttcgagtcagaccctttttcttattgagaatgcgcgttgtgtttgttgacatacctgtctcagcaattcatctcatttctataatcttttggtttctttgccttttaggtcgaggactgttaaccgtttgtttgtttcgatgtatatattgggtgaatttcatagcgacgataccaaccaccgactgttgctgtgtcctggactattctagaggccaggcccaattatatgcagtcgttttaggcaaaaacatactgtttcccaagcccagtcactgcatatgtggttgtggatgcaatatatacattgtgggggccgactccgactcagcctcacagccttgccccgaaaaaatacgagaagaattgggggcgattcttcatgttgtaggattcatgcccaggtggccccatattacatatgtacctattgggtttcatgatatcttcaaattagatatatgatgtttgatattggtatgatttggtagccaaaaagaaacacctactgaggtatggagtacagtatgacggcactggacccctaccggatcctaagcaatagaaacacaatttgtaacaagctgaaggtaaagacatcatatatatgtgcaattacacatcgtaaactcagataatattggacttgcagtagatcgtgcccagattgatatcagcctcgtaaaataaagtgtcgtggcaggtggtgaaccccgttggcggtggggacggtacctcgactagcgtgggcgcagctgatgtcccaacacacccccatcttacccaaaacaactcctttcgcatctttggacttggtctctattactatatcgcactcagtctcattgggaatgcccagagccagctcttcgacagcgtgttaccgacccgcgtggtcgttcccctcattccaaacattctgagttgctctggactagtcactcgttttgctattcacttgagtgcccgagatcggaattcacagtcctgctaaacaacctctcgcgcaaaactggacgcgtcgagtcgagccaagtcgagtcgatatctggtcggaacctcacacctccgaaaacatgtcgcaatatccaaacggtcaacaggcatactacggccaatccgcaaaccctcaagcctctgtcccaccatccaccggccactatgaggtttattcgtccccaaaccccgtgccggaccagcatctgcctcgaaggatgccgagttacaatgccggggatgattctggattcttcaaccctactcgggcccagaatctgagagcgaccgaagaaaacagacagtattcagcacaaggcagtggttatagtggcagcgcgggacagggtggctacaacgctgtgcaggggggctttgaagatgacggagactcgagatattcacggacttcctcagacgccatgtcgcgcatgtctccgactcgcgcctcttcgcaaacctccactatgtcttatcaatatcaatattctggcgcaccttcatcccagccgccctacaacccacagcaatatggccttccccacacgcagtcgcaaccggtcctcgcttataaccctcagacgtacactggctccggcaatgcttcttacgcccccccagcctcgggccatcaaccatataatcctgcggcctaccagtccaccgctgtgtctggactaagctctccggttctacctagaaggcagagcgcagcttcacactacgggcagacaccgccaactccgcaatcgtacggcttctccccccaacaaccaccacttccaccgccgaggggccctgatcacccgtacggaggacgttcataccaacccatgtcacccatcacttcgcctaattacgtgccgtcaagctccccgggcataatgcacatgcctccgcctacatcacgtccttattatagcaactcccagggggctgctgcgtatgacatgccatctccccagtacaccccagcgatcccaagcggttccttcgaagaacagcctcccatgcctccagttcaccagactcatgcaaatggcctgtacggcaggccaagtgtatctcattccgtgtcagggcgaaccctgccgacgccccctatgcagatagacttgcctcaacatccaccgagacgaactgacactttgactcgacaccctcaatcacggcctcttcctggacccccagtcgatgaagccggagcaaatggcaatcactggccggcggaagccccgatggcatatgaagatgtgataagagaggatgaagcggcagcgttggactctcaaaactttgcccggcgtcacagttctagagcttcccatgctagctctgcttcacgaatgcacttctcgcctgatgaggagcacacccacaccaatggtaacatggagacagacacaggccatatgaattatgatgcctacagtgacgaaagcgaccccgaagctgccgctggtttgatcatgctgcaagaagacatagcacgtgaagagcgcgagaaagagcggatgcaacgcgataccaatacctcagttcgcagctcacgtggatccaacatttcgccaagggagcattcaccactctctgatttccatgacgatgccgaattcgtccctgacctatcccaggtcgaaggtggctaccaagcaaacgtgcactacggtgtttacagtccagaagatcactcagaccctgccgcggacaacagatttccaggcacatctggttcattcaaaagctctcggccgcacgaagagcgtggtgagtattataatggatatggacatcatccgcgtctggcatatgaatatgccagacgcctccatcatacgccggccgatgccagggtagatgccagtggtacaggaggattatcggcacccgatgcctatgggcggcggatgagcttcgactctggcgatgaaggagaatcgccatatgatcagacgcattctggagatcaatccgacgacgagagcgcccaccgatccgcgcccgaagatctcttcttccaccctgggatgcgtccattgccaccagcacccgttgagcctgccggcaatgttgaccttgtgtcgtatttgatgcctgcgggcacatatagcagccactcggagcagcaggatgacttggatagttattcacagtataaccacccctccttgccaacctcagcggagtcttatggcgatgctttgctgagctcgtcccaagttccgcggtcgtcatccttgtcgacccctattgggcctcgtactgatgcgcctatcaggtcgaagaccgatgccgaccggctgaggtacaggcagcagcagcaagagcttctctcgcagcttcagcaaaagcacctacctcatatcgacccagcagcggcagcagcggctatgacgctggatctgccaagcatccccgctggccggcgcaagaagttccatcccgcgaagctgtcatcggaacaattcaagaagtgtagcgagccgtgggctttgagttccctcttggcctggattaaagatctgagtgaggacgagacagatcttagggagcaagcaattgccgatgccatggtcgcgttgttcactcataaagtccccaccatgaacattgctgatgctgagacactggctgctcgagttgtgaggggtatgctcgaagaaggtgcattggtgaaagaagaagaatgggtcaagtttggctcaggcactctttcgggtatcttgttccagatcaccggcacaggatgttactcgcccatgctccacttacacgatgtgcacattgagggtactgatagtttcggtcgatgctactcgcatcactgtatgcgaacattgaagaaggtcaacctcaaggcgcaaatgatggcaccgcagaagaaaatcgaggactgggtcactttctacaaggtgcccaaggaggtctgggaagcccatccgaggaaagaagtcgatcgacagaacaatttgcacgaaattgtcactacagaagactcctacatggggcaactggatgtcctacgagaactttatcgtgatcaattggctaagatgaatcctccgatcattccgccgaaacgattgcccaaattcttggccgacgtgtttggcaaggtggattctgtgaagagagtcaacgaggatttcctgttggcacagcttaaataccgtcaaaaagaacaagggcctttcatctctggattcagtgacatcttccgggaatggattcgcaaagctaagaatgtatacatcgactatgctgcaaccttcccaacggcaaactatcttatgcgcaaggaggctgagcgcaacccgcacttcaagcagttcctaaaccaagcccgagaacacaaactgtcaaatcgccttagctgggatactttcctcaaagctccgattaccaggatccagcggtatactcttctcttggcgactgtccacaagaatatggtcaaggatagcgaagaaaaggcaaatctggcacaggctattgaagagatcaaggtcgtggcgctggagtgtgacaacaaagttggagagatgaacaagaaggccgacctgatggaattggcatccaagctgcaattacgaccggacatgaagaaggaggttgaactcaatctcgaacacttgggtcgacagattatccatcgaggcgagctacaacgtcctggaacccgcacaagattcctcgtcgatacacatgccatcctgttcgatcattatctcgtgcttgcgaagatattcacaatgcgtgaccgggcagtgaagtacgagcgatacgatatttcaaaactgcccatcccaatggacttgttgggcctggaaagcaccgacgatgatcccgtggtcaaatcatccgttaggggagtggcgactgtcacgccctcccaagcgggtgctgccagtcctcttgcacatacagggcctggtgcatctggagcgaacggggttgttgacagctcgagggatgacaagatcctgtaccctttcaaaatcaagcatctaggcaagactggaacatatactctgtacgctttctcggcacaaagccgccaggaatggtgccaaaagatcatcgaagcgaagacaaagcatgccgctgctctcttctctcagaatgccgagccattccggctgcgcgtgcttgcggacactgcgtttgcatactctgatcatgcacctggctccaaaagcgtcaccatcaagggtacccctctccatcgtgcgatcacagaagttgagaagcaatatgaaggcgagaaaactcgtcctccagcagtatgcaggactgcagtcaactgtgccacggtcttccaacagccacctggtcgcatcatgtgtgcaatcggcacagactatggagtgtacatgtctgagctcaataacccgcggggctggtatagggcgattcccatcacgcgggtcacacaagttgctgtctttgaggatttcaatctgctgttgttgattgcagaccggtctttgattgcataccacctcgatgtggtctgtcctcccaatgggaaaaactcccagtcatctcaggattcagcccgacgagccccgcagaagttgtctggcaaccgcgaagtgggcttctttgctgctggtcgtctgaaggaccgatacttggttctgtacaaaaagcgtgaggggttgtcgtctacattcaaggtatgtacagtcgcagcaaactgaaaacaacagcaaactcacacgaaaatctaggttctcgagcctgtcctgcagaaatcatccacaaataagagccgcctgttctcgcgtcgctcacaaactgagttcttccgcgattacgacgagttctacatccctgccgagacctaccgaatcaacatgttccactcctcgcttgccatctcgacccaaaagggcatcgaagtcctcaccctcgacaagaaactttcatggtctgtcccagactttaactccaacgatacccaagatgcacacgataccctaaacagcatcgccaatcgcatcagcgggctcaagccactaggcatgttccgtctcagcgagagcgagttcctagtagcttaccagcagtgcgccgtgtacgtcaacaaacacggcgacgtctctcgcagtgtagtcatggagtttgtgggcagtgcacacacagcctgtctctatggcaagttcctcattctcttcaacgacgacttcgtcgaagttcgcaacgcaatgaacggccgcttacgccaggttatacccggccacaatgtcgtctgcatcgatgacggcagtaaggtgccaggctctctcaatggcaatgcgcaggccaacaccggtggctcaatgagtcttgctagcggcttctccggctctaccaatggctctccaggttccacgggtttaggcaacacggtcaaaatctgcatgcaacatccagagtatgagcggagccagattgtcttggagcttgtcgagaatgagggacaaaaagactaaggcagtgccagtcggccgtcttgggtctgtcatcgttcacatttcgcatctttggtttcgcacttggagcttgcatctaccacaaaacttaccctttttcttcgccttcttcgtgttcctttcatccacccaaccgcttttcatccctttctcttttgggcctttattctccgccgtggttatccttcttctctatggacggtggctcgtttgtccatgcctatgcttgttttataccctttttcttcatttgcgtcgtcatcatacaatgccattctagttcctcttcgaaggcttggtggtgactgatcgcttccgccccctggggttattccgcctgcttgatgatgatgctgtacatagaaaacgtcattacatctcatgacttgacgattctctaaattcagaacagttttgatttatgggcgactttgccctttatgaatttttgatttagttggaaacttacgggtctcgaatctattttttgatctcgacatatttacgtcgcaaataccttgtagaattctgtacacgtacgaagagtgctacaacgaatgcgcatgtatacatgaacaagggatgatccggcgcgaagttctttctaagggaatctagaatcaaggtcccaatccgacagggaccacgcgaaagaggaattgaaacatccaaaccaagggttgtagtacaaaattgtatgacgatctaagcaataggtcggcaacggaaaaaaaaaaaggaaacgcatgagatggcagtcaaccgtatatgacatcagacagtatgcaagaatatcatgactcgaactcgacgagcttgctgataacttcgccatcacgggccgtgggggagccatcgtccttagcagaagccgcagagccggacaccttgcgaggagcgtggttcgcatcatcctttccgtccaagagagaagttctctcttccttcccaccgccaagaacctcagctccttcaaggaggtcacggtcagcgtcacggacaatactacggcgctccgtatcagcgccgtatgcgccagcgccccagctggggataccaccggggatggcggcggcagtgttctcacgacggggatagtcttcgtcgtcctcttcgtcttcatcttcctcgcggctgagagcgttacgctcgagatcgcgctgcgcctcgtccattcgcttcttgacttcggcggccatgcggattccgtccgagacgatgttgtccaggacaccgcgcaggcccttgcctggtggcacgatgcctcctgaggcgccggcgacgggtgctgagcctgcagcgagtccggaggaacggatgctgcctaggttggagaaggttgtgaggttggacgacattgaggatgatgcggctagagcagccgggtggggatggtcggataggtggaaggattgagggaagtaggattcaaagaactgctctagaagttcgtcggccaggacaaccattcggaaggtggggagagtgatgtgtaggggattattaggatcgagagccgggttggcagactcagacgttgagcggttatggtcgtcgctgtttgattcgggggtcgctgacttggctgtctgggcggttgcgtctggtgctggagagctggcgggcttggtatcatcaacatcaatcaggtcttcttcttcgtcatcatcgccaatggcaaaagagtctagcttctcagttgcctctgccgttgcatcttgctggtctgcttttcggttttctgggtggctggggtcggcatattcgaaacagcgacggatgaatgcgctgacactaccaaggaatttctcgtcggtagtaagcgagttctcagcatggtcgcggtctgctgtcgagttcaggttttccacagatggagtggccgtgattgtgccctcaaacccacgccgggagaggaacaacagcgcctcggagattttgaggattccctcacgatcaacttggccatttccactgtcatcgtacaggtcgaagaaatagttgatgttgttcatgatgtcaggggatcccttcagccgggcgagaccattcaccacattttggagattcaatccctcctcggggtttgtggcccacttgcggtagaggcgttgcatgaactcatggtttgctggctgtctgcggttcgcccacaatgccgatttccctgatgatggttctttccctgacggcccaggggagtcagcgactgcccatttggacgtggccgctaaaaattcccggaaggcttcatagtccatatgtgtggggctaggcccgagaccgacacggccaacctgggtatccgcaggaggagcaagcatagaaaggcgctgggatctcttccgctcttgcctcctcgtctcttcctcgataactctctggcgttgctcccactggtacagtgtttcatagaagcggtcgtatatcgttccaagatcatccacactcaggcgtttgctttcgggtccaaggttgcgaatagaagtacgcttagcaaaagtctcgatgttttctaacacagcgcccttgtgcttctcgcgtgtctcggtgatcgtgctgtgagtgataccagaaaactccttgaaagcaaccaccatcaattcttggaatctagtgatggctcgaagcttgggattctctgatctcgggtgggcagattcatccagtcgtgagaaatacgacttcaagacagagataaatgacccgtcatcttgtgtctcgagaagctcctcgccattaactcggagaatggcaagaccgacctggaagaggactttcggcccttctaagaagaacacatccaagacacggaaagcaaagacgagcggcatggagttaatatatagcgagagaaaccatggcaacgataccacggaaagttgtacatctgatttggtgaggtgatcccagagaactggcattgttttctcgactagagactcaaacaccttctggtcgagtagtgtgccgtacatcgttgttgaatagtaacctggaaggagacggtcacacagcgcagagagaaggaaaaaggcttgtgcctctgacatatatctggtcaagttagcagacaccctcaataactgggggttctaaacacacatcaacaaggcggcaaccacaatgttcatggcttggcaatacccaatctccgggtcaatccaactgtacgcagtgagtactcgccgcaagcgtccaatgccttcttcgctctggaatccaggatactctggcagactgcgattcaaatctttctcaatctcatcgatagcaagggattcttgtccatcaaatttggacaatgtctgttgatacagcatcggggattgtagacgaaggaacagagaaccggatgtaagttcccaaatttctccacgtaaccgatttggcaaaccaactctgatcagcttgtggaatgttggttggcgaatcaacgtggcattgcgaccattttctagtgagatcggtcagatattggaatatacgatcaaaagatagatgactttttacctctgaaatattcgccccaaagtctcatcttactgcgatcgcgcagcttgcgcgcatcgccagggtagcggaaaatcagacccaggccggcatccggtggttgacgagtatctgactcattcccatcttgcccctttccttttgcacctgagagcagatattccgaatagcaatccgtgacgacagtccgcaggttgtcaacctccttcattccttcccgcaggccttttttcagtgtgtcacagaatcgctcgcaggcctgtctgctaccgacaagctgcaatatgaggcgttgagggacgaggttgggttcttgctgcttattgagcaaaccattccatgttgtgagcgcaagggagaagacatgactggcgctatgaaggcgttcgacacgtcttatgcaggatagcgggagaacgaatccattgcctgatggcccagtgccgtgtgtctggccagtccaggcggtcgaagtacttgcagtggcagaggggatgaagcttgtcggttgggttgaaaagcatatgaaacgttcactcagatgcagacgtccagtatatgtgtttcccgcccggtcaaccttgcgggagccatctccttgattggccgaggaatttggtagcggtagaacgagatcagcggtgatctcttgaagcgggttctgagaatcagggaggcggaattgttgccggaataacgatgcctttgagggattatgatcgggcgaggatagggcgggaatgttgaagttggcggggtcaatcaggctctgggccttttgaacgaaggacgaccacggtatcatgttggagaggtgacgtgggaatttatgtgaatgtcctgaagccgataaccgatgatgtcgggatcaagctacagttactccgagtccagcagatccgggctaggaataggaaaaaaggcccgtgcgtagttgagattggagcttcgaggtcatcgtacaagctaaatcatcgttggccgaggactacgcctgcagaacaaaaggattgcgtctggtgttgttgtcggattgataagagggggcgtgatgatgccgggttcacgtgaccatcatcagccttatctgtcgtcccgaggggtttgcagggtttgtattatatagtggcctcaggcactccacagatctatagcctagggccgcgtataaaagaagaaggggtttctattaactagttaggaagcgagagacttactagattatataattatattcctatatgtccatggatggcctatctagcactatctagtagaaagaaactaatccagtcggcaatgtttaaacccctcgatgatgatatagttctgctagagcatggcatgacgcccgatgggaatatcgatcccgatcttaccaaggaaatttgtcagacggctcttttgagacattttccaccgagactgaaaatggcacgtacttccttcgttcgacctttgtcgaccttgaccctccgttacatatatgtaatgagtccagaaaaggacaggacttgtagaacatgattcgagcgagcttaacataaaaatcgaagaacacattgaaatgaaacaggatgtaggtagaatgagagcaagaacagactggaacaagacaagatccaggaatagaacaagacattgacaaaaaggcaagggcaaaaggataatttggcacgaaacaagatttgaacaaaatcaagctcaaggcaatcattggccattgaaaattgggtgtgggatagctcactatgagcgaacaagcatatgacattgactcagcactatgcagactgtgcaagtggaattggacctcaatcaagagacggcagaaccgcccatgattttcgggtgacagagggccctgtaagaagcaccaaaaagcatcgactgttgaggaaagagaagacagagctggcttggcaagtgatcggcataggccaaacgacagaggaacacgacagaggaacttggtcttcctttgcttctttgtctgttgatttcgttcttgtcgagtgaccggagcttcaacaaggcgtgaacgtggatctttttggccctgggaaagtggaccaagcgacagcggaaactattgtcattgttttctttttgtcttttgttcttgtcgattgacctcgagcttcatagggctaactgcaaccatgtggattgacggcggaaaagaggtggagagcctagtgtagctgatgatgggcatgtctgggtgagacgacagcggaactctttttgttttgtcttgttggtgttcttgtcgagtgacctgaaggttcagcatggcatgcgtgggtttggccgtgggtaaagtggaaagtgccgccggacaggttgtgtggccaagggtatcaacgacaacagaacttcgtggatttttctttttctttttatttttttgtggactgctttgttcttgtcgatgaccgttgagtatgatggctcggtgtttcccggccgattggcccggcgaatgagtggaaagaccagtccggctgccaattgctggtgcccaaggatagcagggcccttcttttggtccttgcacttgttttatttttgcttgtgtggttggtcatgtcttgtgcttgatgatccatggcttgtgttgttgtgtcttgtgtcgggttgtgccccatgtttcgtcttgttctgtcttgctgttccaaggttttgtcttgttccttcgagtggtcctttggcaccacaaggtctggtgtatttatgaggattgacggtggagagccaaccctagtgaccgttcttggtcggagacagtagatttttctttttcttttttcttttttcttttgtttttttgtttttttgcttgtcattgatagtcatcttgtcaagttcaccgctggtgtgagagaagcgtgtgttttgcggtggatcattcaaaggaaagatattgaaaggccagtctggaggtggccggtgatgacccttgaaagaggacttgaaggagtgtatgttgcccaggtgtattttgtattgtgtttgttaagcggtcgtcgggtttcgggaaatcagtgtatttgcgtgagcacttttcgtaggaaggaaaccccagctgagaaattgagcactgtccagacaggctgataatggccctcgaataagacagcgggcttgacaagatcaatgtgttcttcattttttttttctctgttttcttttttgtttcgtgtgttctttcttttttttctccatgttttgttttttttttttttctttttttctttttctttttttttaaatcttatcgagtgaggctcggttccgagaaggcccagtgtattcaggaaggacctcctcggacggacgaggaatggtcacgaggccctgcttttcacaggcctcgccgtcctcccaggcggccttgtgctccgaagaagtggtgccgcggtagcgttgccagaggaaaaccacagcctggccgaccagcatgccaatggcactggcggtcaatccagccaggacacccaaaacagccgggataacgataaagtgcacaatgcgagagaaagtgcgggcgaaagcgccgtggtatgggtggtgatgatggggacgagcggagccgtgggcgtgggcatggtggcgaccgtcttccccgaaaggaggcgggaaagggaaaggcataccgtcgtggccttgttcatagtggcccattgtcttgcccttgtgtttgccatggcagctcttgcggccggttttggtcatgcccataacacgagctttggcgccagccaacaggcctcgaatacgagagaccagaagttcctgcaggcatttggcctttccgttgcactccttccaggacaagcggtcggaggcaggagtggtgttttcaatttcagtccgggcgatgaagagctcgccgttgggatcctgtagaacggtgatcgcaacggtatcgacagggactgggtgggtctcgaggtcgaggacagtgaatcggatatccaggagttcatagcccggctcgtcagacggtgcggccatcggcatgatctcaagggcatagccaacaggcattgggttggagtcctctccctcttcattttgttgtacagcaagaattggaataggcggggccggtgggaatatttggcggccgttggccagcaggcagttgtcttcgatcgagaaatccagagtctaccggggtctgttagctagttcaaatgaataaacggattctatcatgcttaccagagaggatggtttgccctccgcccaggtaacaacaccttcgtcgttggtttcacgcagaggacattcagagcagggcaggtcaacaatcgcatgatgaacgtcctccaaaagcatagggtgaacattcacaaacccatcttcaatcatatcgactttaggttccatctcggggacgacgagcatcgcactggcgccaagggcagcggcgccacccagcaagacggagcgcacgaacatggcgatggaaggaaaccaaggtggaggcaaaatgtaagtcagaagcaaggcgatgcttccctccttaaatttgatgagacaggtagactcaacagcgtgatgaacaatatctcgagggggtatggagataagtgatcttctttcagcgggaagtggagtgggtgacgccagctcctgcgtggctcgtgctgtgattggtggatggctgatagtcagcctgctgactgtgttggcggcatctcccgagcttggagattcgtgtttggatgcgtaggctcaaagaccctctcagaggaacaccgagtggcatacaatgtggtattgttgccataatcttttgtaaaatggaagatggcgacgactccagttccaagcgtatagggtatgcgctcgaaatattgctgatggccgtactccgtatatcacagcataatccggtttgcacgtcgctttcagctaccaggagttggcatggcatctcctgagagctctgggttatatgtgatactgcatcatacatttcaaggtgacgagtcacaatgttgatggtggcgtgggctttcgccgagtgcgaaatgtgcacggcctggtgaatagtaggaccaaggcgcatactgcagtatcaggttttcaagcttccgggagaccataaaatgctcccagtttccaggagctgacggttgttgcaagttcctaccatcagcctgctcattgcgcaggtgccatgatgccagctcctaggaaatcaactgatattcccgttcctaggagctggtgattgttgcgcattggcacggtcagcctgctgaacatatgtagaccgcattggattgtgttcatgccatgttgccagcccccgggagattgtataatgtcccccactaccgagagctcgcctgttgctcgtgtcagctcccaggatatcatttgatgtccccaagtcctaggggctgacaacatggacgaactggcgaattcagcaggctcactatgcaggtggcatcaaatcgtgtttgtgccattgccagcccctgggagatcatataatggtcccatctcccaggggctggctgttcagcaggctgactatacgggtggcatcgaagcgtgtttgccccattgtaagtggcatagtcagcctgctgaacacgcaggtggcagctcttgtgctattgcaagcccctgggagatcaaataatgttccccacgcccaggagctggcctattgatcatgtcatggtgccagcccctaggagaacatttgatgtccccatctcctaggggctggcgggttgttgttgaatcggcgggttcagaaggctgaccataaggccaactcctaggagatcatgtaatctctccactgtcaggagctggcgcagtcgctctagaaggtggcatggtcagcctgctgaacacgccagcccctgggagatcaaataatgttccccgctcccagaggctggcgcattgttcctgctacgtgactagcaggctgaccatcgtgccagctcgtaggagatcatgtaatgctctccgctcctggagctggcggctgcagaaggtggcatggtcagcccgctaaacacacaggcggcagcttttatgccgtatttccagcccctgggagatcatgtaatggtccccgctcccagagactggcgcgatgttggtgttgctagcccctaggagatgataatggtcccatttcctagcggctggcgtgtttaacaggctggccatgctggaggtttctgaaggtaggatggccagcctgctaaacacgcaggtggcagctgttgtgccattgccagcccctgggagatcgtataatggtccccgctcccagaggctggcgcgctgttggtgttgccagcccctaggagatcatggtggtcccatttcccaggggctggcgtgtttaacaggctggccatgctggaggtttctgaaggtaggacggtcagcctgctaaacacgcaggtggcagctgttgtgccattgccagcccctgggagatcatataatggtccccgctcccagaggctggcgcgctgttggtgttgccagcccctaggagatcatataatggtcccatctcctaggggctggctgttcagcaggctgactatgcagatggcatcgaagcgtgtttgtgccattgtaaagtggcatagtcagcctgctgaacgtgcagtggcatgtgtcgtgccattgccagcccctgggagatcatataatggtcctatctcccatgggctggcgcgctgttggtgttgtcagcccccgggagatgatatgatatctccgtctcccaggggctggcgagttgttcctactgcgtgtccagcaggttgaccatgcaggtggtatttggaccatcgtgccagctcccgggagatcatgtaatgctctccgctcccaggagctggcggttgcaaggtggcatggtcagcctgctagacacgcaggtggcagatgttgtgctatattgccagcccccgggagatgatatgacatccccgtctcccagggtctggcgcgttgttcctcctgcgtgtccagcaggttgaccatgcaggtggtatttggaccatcgtgccagctcccgggagatcatataatcttctccactcccaggagctggcggttgcaaggtggcatggtcagcctgctaaacacgcaggtggcagctgttgtgctgtattgccagcccccgggagatgatatgacatccccgtctcccaggggctggcgcgttgttcctcctgcgtgtccagcaggctgaccatgtagatggcatggtttgtgccaccgtgccagctcccgggagatcatataatcttctccactcccaggagctggcggttgctggtggtggcatggtcagcctgctggacacgcaggtggtagctgttgtgctgtattgccagcccccgggaggtgatatcccgtctcccaggggctggcgcgttgttcctgctgcgtgtccagcaggctgaccatatagatggcatggtttgtgccaccgtgccagctcctaggagatcatgtaatgttctccactcccaggagctgacggttgctgatggtggcatggtcagcctgctggacacgctcgcggtgtcccgtatcggactctgttgcttcatggccatctaatatatcactctgaccccaccatagatgatctacccagtttcctgggtaggcagtgggtgcgatataaatatggttatatatcatatcgaagacatcatacatgaccccgaagggtccgcaacaggtgtgtgtaattgcacttgtgcaggtgaagcggcaatcgtcggacttgccagcttcctgccttgcaatagaagcatcattgttggattgtcagttgccatcaaccgaacaatgtccggtctccggcaaaactacgcaagatgacatggataatccactccaagagtggaacatagccatactcctcgcgcagttcctccaggaacttctctgggccctcaaaggcgtacgcaaggtgttcgaggtgacctagccacaatggggacgacagcagagtcaccatcaccatagcgaatacaccaaaggaggcccatcgagttcctgtccatagtacccgcaatagatccgagccctcatgcatgtctgactcgccagacgcagtgatgacaggtgggtcggaaggccaagctcctggcatttgaagaccagaagtcgctgcgtcttctccgcccatttcctcctgtacgtttcctgcagtcttttgagcgctgcaatttgggtcttcggcatcctcgaccctcttggcgccttccgaaacccccgcacgggaatctgcccctgttgcaacggcattttctgccgaagcgtcttcggggctggccaccagggaagaggtggagcgcctccgagaggttgctgtgacctgcaaccccttcagggctttgtaaaagtttggccgacgttcaaccctgcgaaagcgcattgtgggcatcgcctgtgtccgcgactgagtatcggtccactcgctcggaacggcacggtcggacccactcagagtcggctcagggacaacatgcaccctccgaactctctcagtccacaatggcgtagcgtgggctgacttgatttgggctggctcactaggagcaggcacacccaaaacgtcgtcggacacattcactctaagcgaggtgggctccggggcagcttgagtcggctcgggaacagcgggctcgctcaaagctgaagcgggaagaacctgctcggtcttgagagtgtcaatttcgtccgaatcagcttgagccggcttgggaacagcgggctcgctcaaagctgaagcgggaagaacctgctcggtggtctccgaggcagcttgagttggcttagagacagctggctcactcatagctgcctcagtcggcacctgctcggttgagacaccctcagtgtacttgaaatcggtctgagctggctgcgtaacagctggcacactcatgactggcacttccactttcacagcagtgtgacatgtgtagctgtctgatatcgcaagcaaccgggatccgttgcttgcgataatattgtccgtggccctcttcttgcgggtaggctcatccccgctcgaattgtccacgccagctgtccgtttgcgcactggcatgttgacggactcgaatgccatctggggcacacgacgggcacgacgggtaggactgacacgacgggcacgacgggtaggactgactggacgggtaggacgggtaggactgactggacgggtaggacgggtaggacgggtaggactgacacgacggacacgacgggtacgacgggtacgacggacacgacgcacagagcgccgttggtatggctggtatcgtgcatttcgtgcgtattgcttgcgcacgtgtgggcggcctcggcttttggctggcttcaagggttcaacaggggcatccggtatgacaatatcagagggatccgggcgggcaatatcagagggatccgggcgggcaatatcagagagggagggggcggcgttagaggccagaccaggaactatcacggcattctcctcgacggtagacgatggaggggggaaggcgtgttcaccagatgcctggctcggagccgccagggcatcttgattgattgtgatcacgggctcctcatcccagtccatgtcaacgtcttcgtccgtaaccagttccatggtatcctgcgacccatcttcctgtagcggggcggcggcaagttcttggcccttgggtgagctagcccgcgacgatctgcggctgtccaatgacatcacgtcggaaagcacgctagggctttcagaccgcgacctcatcgagcagtcgccatcgtcgacgacggactcggcgtcactaccagcaccgggaccctcagagaggagcggtcccgggtcacgagccttccctttgccgagctcttgcgggtggaaatcagatgcatgcccatgggagcctggttcctggcttcccacgacgtgacgacgcgcaatacccacagggttggtggtggactcagcagtcggagcactgcgagcccgcacctgactgtcccttgtggcttgcatggccgcggcaagcatgaggttgaggttcctggcgaggcctttcattcggtcctcggcacccgcaaggcgttgttggcgctgcaggttgaattcagcggctgcgactatctgtcgcagatcctggacatcgtgccggtccttttggagggcgtactgaagaccttggagggcagctttgtttccttcagcgcgctcgtgttcttcagacacctggtccaatcggtcctccaggatccggaattggcggtcgatgtcgcgagcccggtcgttgtaagaccggttgatcaaggcatctatatgcgcttgatcaacaaaccgagtggtgcgatgggtcgccacttgggatcgcagagcagacacctgggacccggtgttgttctgctcgctctcctggcgagaaatagtcgcctcggcatccgccagacttgcgctcaacgcggtgactccgcgcgatgtctgtcgtggtcggacaccaaggggggaggaacgggctgtgtcggggcccaccaggggggtgatcccgtgcgggggaccctggttgttgagggacgggatggcgggggtgggggcacccgccatttgaaacccgataacgccgttacggcgggttgatctctgctggtttgccattacgaactgcgagacaggttagatatgatgctcaaaaaattgcttacaaagtaactgaactcacaatttcgaaaatggcaacgcaaacaggcacgcggggggagatttcttgtgcgaatctatgcgacgacgcgttagaaaaggtagacagcttactcggacggggagttggcactaaccagcagtttttttgggcacttcgcagatgaaccacgaagggaaaggatgggatctgatgaaatctctgatgatggaaaaaaagaagagaggaggagaagaagaaagagaagttgagaggaaaggggagaagatataggtaggcctcgacacgcgacgtgttggtgaggctctggcaccttctgggtcaatgacctgctcaatggcttggtctcacctcctgagaccaatcaataggctccccattgtttattgatggcagggtctttctccaacaatggctattatgagatctccaataaagagaacaatgggatgtctcattggtcccttgaatgctctttttctaggaataggatgtctcatccagcaatacagtctacatcttttctgaatatgtgtctattcaattgtaccttttctagagttagctctacgtagagattcccagcagtagctcgctgacatacatgccctcgagatctgcgccatgtggttgcggctaaattgttctcggcctgccgaaggccagtgcactcggtttaccgagtagattttccttccatggtctaacgaaagcttggaagtcttggcgattgcgtaccgccaggtctacttacgttctaaaatatagtcatggcgggggctactgtcaccatgattcttggtcaaaaaagttgtcctgccccgactctcgtcgtcacgcattcacgggacgatctgcacgcttttgtgggttctactgttctggcatatgattatactgggtttcaagccctcctacactgggagtcattgctaacagaaaaatcatatcccctagagccgttttggggggatgggcggtccctcggccccacaacagcacatggaatacatacgagcacggtacgggccggatccgtcaagcgaaccaagcaccggccaccaaccagcaagctgtccgtggggatctacgcttgagtcaaagcagacgcggccacctgaattagcctacattgcacaatcacacgacggccttcgcatcatggagatactccatcaagcgaaacgacccaaatgtcaaaatcgacattggaccatttccccaagatctcatgtcccagttgacgcaattgatgatctaacaaccgaactgtctctaacagaccctcaaccgcgatacgagacctttgtagtcatacccgttgatcttcccatggcagggatcccattccacttgattttctcatcggtacggggtgaaggtaagcgtctcattttgccgaattcctcaaaatatctgtcgtgcaaaggagactgacactgtttccgcttcagatcccctgtccagacgcccaggaagcttcaaactaccagcagccctcgcagcaaacatccggcaagtggtctgatccgccagcgaaggatgttcaatgtgacgattcacccctattggtttcataatttcgaaaaccacccaacacccaattatacaggcaaggggcatctgtgaagatgacgtttccacaacatgaagaaagacatccattcaaacggggaaatcttgttcccaagcctaaataacagagtctatccatgccttccccgctcctcagctagcaacggtgaagaaagccattgcaccatcttagcgtctatggagcacggctcgctttgggtttgctatatagtattgtcacacatacaagtgtcgggaggagtgctttgcagagtgaagacagggcacagcactttgggcatgcgataacagcaacttgggttgatctagtcaaggcgacaacatcagaaatgtcatgaatggatataatatctatctgtcaaatccagtgtagttatacgtagtgttatctatccaaaatgatccgatgtattatcaatatcttgtgcatgatttcagtagctcaaagcttagatttcttgccggtcacgttgggtacttcatctcccgaaagtaaaaagtctgggtaagaaaggctcccaccggaagcaccgcctgctgacatgcgccagtttgcaccatcaactgtttagtgtcagtatggagcgtccatcacgttgttgttatctgacaactcaccaacaagcgtttgaccactgacatagctgccagtgtctgagaaaagatacaccgtggcatcggcgatgtcgcggacatggccgaagcggcccagcggctgggccttggtgtaagcctctagggcatctgctggtagcaggcgttccaaaccctgcagaatggtaagtggaccaatttttaccatacgcataacactgttgagggttatactaacctcagtttgcgcaataggaccgggcgcaataatattggaagtcaaaccgcgaggaccatactcgattgcgacactgtgcgacaaggcatcgataccagctttggcaaccgatacatggctctggaaaggcataccccgatagtgaatggtggcactgacgaagatgattcttccaccggttccaaccggtgatggttgaactgaaggattgtcagttgcaacgatagacagaggttcgggattcacccaatggtgcactcacgagtcgttgagtccattctgtgcttgctcgctgactcccttaggtacggaagggtcgccttgagggtattataagagcccaagacgtcgatatccattactgatttgaaagcgttgaccgagagttgctcgatggaggcgaggaagttacccgccgctccagcactgtcggatactatcagtattgagaatggaagactgccgtcaagttactatatcaacgtacatgacgaaatcaattcctcctagctccttgacacagcgctcaactgcttgctgcaaattctcgagcttgcgtacgtccacggaaccaatgccaatcaccttggcaccgggtcgcgctgtcgcgatgtcctgggcaacgcgctcggtcttctctacattacggccaatgatgcaggcgttggcacccaggtgtactaaggcccggacctgggcactacagatagtgccggcgccacctgtgcagaagacgaccttgtttgctggatcaggaattagcgtgggtgcggtggcgacgggctagaagagagcttaccgaagatcccatccttccaggagtcactcaagtattctgtcttgggcagcggcattctggttactatgtacacccctggataactcagtctaaagattgtgggggacttagggacgttcaggaggtcggccccaggtgatttaatgacacccgtttccccacagtcggacctcggcttcacggatttatgcatttatgaactttatgcgcccaagtttgtaatgcataagatattatgcgaatatgccaccttggaagcttttgaggaattatcccaaagctgttacagccaacactttctttgatacgctgtatgtagggaatgatagtggtactcagtcctcattatctgtgtatcgcgccttcatcacgctctagggattcattcattcttcatagactgtatcagcccgtatctaggtgtccaggcatacatgtatccgactatttcagagtcaagggaactattttgctgctattcgcaaacgtgtatacgtacatctatttttctaaagcgaattggctatctactagactgcgctctcaaaaatcaacaagctaggcagtgttttgcgactcaaacagctccacttccttaagtgccttggcgacagttgctaacagttggtcactgttctcgggcccagcactaatgcgaagtatgtgttggggcaccccgtactttgggaccttttctctgttccagtaattcgccagctgcacatatggaatcaccagaagttagttccgaaactggaacctttgttgcttacgcggggaccaatgtaaaagataagttcgcaagagttccaggaggagaaggtttgttttcctgtcgttccatatacaccgtgaaaattggccagtgataaaacgttctcatatatatacacatagacgtcgatatagtgccactaatctatcatagaaaaaacatatagattcctctcattgcgatgaagaaaggccacccgctgattggctggcgtgtgggcggaccgcgacgtcaccgaaaaagaaccgtctctcttctttgcattgttgacgcgaatattcgactcaaccaatttcggacttcgttgttttcattgaatacaaaatccgagacaagtgattagctttttattctgcaacatggcctgtcccatcagcgtcagcaagtttgttggcactgtctccctcggtcttcttaccgtacgtcaaccgcatctatcgcatcataaaatatggccaacaagactaacaacccctctcaaacttatagggcctctcctactccacatcaaacattacaatcccggctctacagctccttccaacagcgacaaccgccgcccgctccctaaacgaagtgaagcgtctaacccgccggtatgcactgcgcctctccttcctgaccaacagctgcttctgtttcgcatggtgcctgtcctctccgcgccgccgacacccatacatggtctggctgtgggcattttctacaatcggtgcccacggtgttgattactggttcaaccgtcacctcggcttcaagaactgggcctcggctgtcatccgcgacgtttcccacttctcccttgtccgggactcgaccacaaagaaggatgaagaccttgtcgtggttgaggctgaggaagacctgaatggcgagaccgttcagcgcgagatggaccgggagcgccggctccaccgcgcgcgcacttggttgtctggtattgcgctttctattggcattgttggtctctggggtgacaaacggtgatccttttctcctcattctgtgtcccagagtttttctttatggtgaagacactggttgttgccccatatctattttctggaaaagccttttcgctactgtttgtttgatcgcgtctaatatgtttcgtgcttgatacctttttgttccgttctctttctctttaggacatcttttcgtgaacattgcaatggaataacctagaatggagtaacttctaacttcgaatccggtatatccgagccatatttacaaaatcgtaccccgaccagccatgaagcgcatcatctaccatagacacctagccttgactaacgtgaatggggaggcagaggaaagagaaattgatacgggaatccagcgtttcatttgctatggttcacatgtacacgatacatcttacctataacacgcacatcagcataacataatatgtaccaaggtaatagctccatacgtacagacaaacaacatacaactagcatctgaagtagatgccttgaaccgaccagactcgcctgcaaatcatcctcatctttgcttaacagccctcagaccttgaataacaaggataattgttggtaggcttgccatgatttcccctagacaccttgcgagtcgaaaatgaacgataaaagtgggcagtcttctagcctagctaactcacataatgagtaaagatcattaggaacaaaagtaaggaataatagcagaatgtacagtaagtgactagagaggagagtgagaatagactgagatgagagtgagagtagagtgatatacaaagacacatgtatcttcgggttagaatatacctaggtattgtatgcgcactttatagaaggtttgtatatatactctgagattaccaaatggatcataccaaggtgaagacgtgatggatagataaataataaacgaagaagataccctaagtatcaggtagcagagtaatttcgtggtccttagaactgtgagctataaataccatcttcttccttcttcatcttctctcttcttacaacccctccacatctccacatcttcaccgaatggcactatatatacccatgccttgcgttcgtgagttcgtctcattcttacttaccccttgtgttctactaacatggtttctaggactataaatactcgcttctccttcctcttccttcctccgtcctccgttctctcccgtcgcctaactccgaagggcaaaacctcgtcctatgccctaggcctcgacgctaggaaaccattttatcatcgtctctttcgatctatctgcttttcagcctgagaagcatctactaagagacaataccattgccattgatggttagtcccaactaaccttccaagtaacccggctaccttttcccgacgcatttcgcacagattcgcgcccaccccctttgctctcaacttctcttttcttcttcttcttctcctctcttcttttttctatcatcagagatttcatcagatcccatcctttcccttcgtggttcatctgcgaagtgcacaaaagatctgctggttagtgccaactacccttccgagtaagctgtctatcttttctaacgcatcgtcgcatagattcgtgcccagtctctgggcccttacaaacctctctcgcgtctctgtttgccatttcgagacagtgagttcagtcactttgcaaaagctttcgagcatcatatctaacctatctcgcagttcgtgatggcaaacccacacgcaccagcccgccgtaacggcgtcattgggtttcaaatggcgggtgcccccacccccgccattccccacaccaacaaccagggtcccccgcacgggatcacggcaccgacatagcccattcctcctacgctatccctctagtcgccccggcataccgagcaggcgcccactgaggcagctatgagtgcgctagctgttccccagctgactcgagttgccctagaggccactgaacaggttcttcccgcttcagctttgagtgagcccgctgttccgaagccggctcaagctgattcggatgaaatcgacactttcaagaccgagcaggtgcggactgaggcagctttgagtgagcccgctgttcccgagccgactcaagctgccccggagcccacctcgcttagagtgaatgtgtccgacgacgttttgggtgtgcctgctcctagtgagccagcccaaatcaagtcagcccacgctacgccattgtggactgagagagttcggagggtgcatgttgtccctgagccgactctgagtgggtccgaccgtgccgttccgagcgagtggaccgatactcagtcgcgggctagttcacccaagggccaagaacttgccgccgccccgctgcaggaagatgggtcgcaggatactatggaactggtcaccgacgaagacattgacatggactgggatgaggagcccgtgatcacacctaaccaagatgccctggcggctccgagccaggcatctgctgaacacgcctcccccctccatcgtctaccgtcgaggataatgccgtgatgccagaagcaccacctattaccaccactatcatcaagccgcagcaagtggacaacacttgctcaacaactaggtgatctagtgtactactgaccaatccaaaaattcatattcctttcaatgatttccgccaaaataaaaacatgaaatatctagagtaatgaggagcaactcgagtaattcctgattctacgtacaaaaataaacacaatagcaatagccgttgattacacatgaggttgaacaatgccgatatcgaagggggattcgggtaaggtggatagaaacgggaaagaaaggcatggacaacgttgtgggtttcttgtcagaagatgtatataaaatataaaatatatagcatgatctacagaaacacctcaatgataactcggtcactatcgactggtatgacgcaccgcggagaagacgactatatcctcccaaatataggtttgaaatgagcagtggtcaaatgtgccatgtacccctattgactaggattaatatcgaggaaggataattagcaacttcgagacatagccagaccaatgatccgaagaaataaaattaatcccaatacgctaaggacaaccgcagagctgtcggaaatgagccccttagcgcaaaaagaataagaacacgacagcgtaggttgtgtttctgcgaaaaagaagaaaaaattactacagacctggattaaaatcttagacttggaaagcatggtcaacatcaccatcgtcaacggccaaatctacacgccaggactggcaattgtcgatgcgccacaacctaacacgcccctcggaggaggcaagtcaatacaccagaatatattgaccctttgctaatttcctagacaaccttcaaattgcaatcgacgtgtccggcaatggccaactaccgtggccggcatcaactcaacccgactcgtccacccgcttccacgacatcacactcttcttaacctccgagtcgcacaacttcaccgtctccaacggcacaaagcccgcgtctaacacaagttacgtcggtcccatcttggacctggagccctcatccaccgtcaaacatgtgaactggatttggcccgagtgtctcgtgggagacgactctggctcaaaggactcggcacgcgggacatacaacatttccatgcaccaatctttccgctggaatgggattgactattatactgtctttgacctgccaatctctgtcaccaacagcatacccgagaacgataaccggctcgactgcgagatgctcgaaaaccagctccttagcgcggcggagatcggcgagagctcggattcactgcctgggcagccgtgggttgagggtggagttagtacgacggcgttagctcctgaggcaagtcagacaggggcgggcaaccggtgccatttgggcatcaagagagtagctggcattgcggttgttatgacggctattttgcatttcctgggttgagacttcttcctgggtttcatcccttgtataccacttttcatcattgtttttgtcttgttcagattaacataggaaccatttctatacttccgcgtgtgttcaaccatattaagattcaaagtcaggctgtcacaattcctttacgacgatcggcgaataactgttttactcctttcgtcgacgatcatcgttgatatttctgctttgggaagtatacattctcacattgatcttggaacatcccttgattgccaagttctcccttctagcaatattgaatatcctctatccagggtctctcgaacatctccagtcatgtatgtcaaaaagaccatatcgcgcacatcgcaaccgaccccgacgttgacaccaaagcaccaatctccccaataccctcgctttccatgacgattttgtccacctcccgacgagtcctccggtatcgcatcgcccgggctctgattataatcttcgcgatatggaatctagccgaaatacatctgattcagcaccgaatttacgaagccgagtatactgcgctccgacgccggccacagaagcaagaacggatatatattgcaagcatcaattggaacaatgagctcattctacgcagtcattggagcaaggcactcacacagctggtcttgaagcttggtcgtgaaaatgtgttcatcagcatatacgaaagcgggagctacgataacacgaaaggcgcattgagagaactggactgggaactcgaacgaatgcgggtaccccggaatatcactttgtcgcctgtgacacatgaagatgaattagccgcacctgcagatggcgaggactggattcgcactcccgatgggcagaaacaactacgacgagtgccgtatctagcgcggatacggaacttgagcttgttgcctctgcaggatctcgcacggcagggtatcactttcgataaaattctgtttctgaatgacgttgtgttcacggtgagtacgagtcagcttgtcttctgcgaaggtgtattctaaccaagaccatcttttgttgaccagccgagcgacgtcctcaaacttctcgatactaatggcggcgaatacgctgctgcttgctcgttggatttctccagtcctccggactactatgacacatttgctctccgggatagcaagggccatgaatctattatgcagacgtggccctatttcagctctgcggaatcgcgacatgcaatgaaaaatatgtctcctgtccctgtggcgagttgttggaatgggatgggtatgctgaccccgattctataaagtgaataaactaacacatctccagtggcgatgcctgcaaatccattcatcgccagctccccacttcacttccgaggtatccccgattccctagcggagtatcatcttgaaggctccgagtgctgtcttatccacacagacaacccactgtcagtggaaaagggtgtttatttgaaccctttggtgagggttgggtatagtggcgccgcatatacagctacgcatccgatgatgaactggctgtctgcgaaacggattttacaagggctgtgggttaatcgactacgccggttgggtatcactacgtggttgaaagaagtagtagttcgaaggcggatagacagctggagagtgtcgggtgctgggaatgaagagcgtggggaactttgcattattaatgagatgcaaattctgcatcgatacggatgggcccatgtgtaagaagagtaagtgacgttgtttgataaatcatctcatgttgataaattgtattcacttcggacaaagtatgtatttgagggatggagtggtgcctagtgtggagatcaagttctgcaagaggctgatctacaatgtgtagatagatcggctactaatatactttgaactgcctaacataatacaaaggagacatcacaaaagaataagggtgtgttccgtgggaccgccaatggctatggagtattcgtgcgcacaaatactcagccatgactttatgcaagggctcgcacgagaactggagtttgatcagggtgcgcaccggcatacggcagatctcgacaatggtaatgttgacatctccgtagatataagcaccaagtgccgggaaccctccgcctacgctgtctctgggggctacggagagacattgtggtcgagagggttggggagaggaaaaaggaagaagagaagagggagaaaggtggaagtctttttatacccccaagaacacgcgtgccttcctaaacacgacaacagtcgtaccttcccaaacttgaaatcttgccctacatacctaggtagggacctcgggagggctactcagacagtcagctgtattttgtctgcatagtacctaggtagagctccacggtgagacaatgctgtcaatatacaaaaatgatatttaatatcttttactctatcagagagacacaaacccccagtatctgggaacatggtccacatttagtctaatacccacttctcaactcctcccagattgactttttatacccccgaggccggcccaaagcgattatgtaaccccggcaaatcgccccgtttaggactgtatcaaacaccaaaacccccacttacctccataaaccacctaaatccccaaaatacacataatggcaacaatccaaatcctagacggaggtctgggcacctccctgggcgatctatacaacatcaaattcgattccaaaacaaccccactctgggcctcacacctgctagtcagcgacccagcaacactgcaagcatgccaacgcgacttcggcgtcgcaggagtagacatcctcctaacagcaacctaccaagtttccgctgagggttttgcacgcaccaaaaccgcccaattcccagacgggatcctgcgcagcgcagtgggacctttcctacagaaagccgtggacatcgccgagcaagcgaaagtgcgcgagagcgcaagcgtcgcgctcagccttggtccttacggcgcatgcatgatcccaggacaggagtatagcggtgcatacgatgccgagcatgactccgaggagtcgttgtatttgtggcacttggatcggctgcggatgtttgctgaggcggatggggagcttgtgtcgcgggtgcggtatgttgcgtttgagactttgccgcggcttgatgaggttcgggctgtgaggagggcgattcgcgcttctgctttccgtgtgccgttttggattgcttgtgttttcccgcgcgatgatgatctcttgcctgatgggagttcggtggaggaggttgtgcgggctgctgttgcgtcaatggagggtggggatgttccttggggggttgggatcaattgtactaagatgcataagcttgctgggcttgttgatttgtttggtcgcgctgttgcggaggttgttgcggaggggcaggtatctgctccgccgagtttggtgttgtatcctgatgggacgaatggggaggtgtacaatactacgacgcaggtttgggagaaacgggatgggttgggtgacaatttgagtgctaatgtgagtattactctctggtgggaatgttagagtactcaggtacaattatgctgacttgaaaatttagcgaccttgggaggagcagttggcccaagtggtcaatgaagcataccgaaagggccatttcacttcgttccttgtgggcgggtgctgcaaagcttcccaccacgatatcaagaaacttggacagcaattcaagactcaatagaaaatttaagcggaacacaaatggtgttgtaaatgcagattgattggaatgagatattgtacatcgctaatgttgtcgctaatgttgaatagccagctaggcatgcaaatatttatacatcataaagtcgtttaaaagagccaatcggtgaacttcgtccacgcattgttatgcgggttttcaaccggcatgatctccccatctaagagacggcccgaccacaagtcgatattggcagcacgctcaaactgtgcattcaacatgttagcaaatctttgtgagaaagaaaaaagaataagaggggactggactaaccttggtgcgatgccagagcttccagcaaatgatcggaacgatgaaaatggggataccaatgtacgacgcaacaaagtccgacgtattccagttgcccttcaagaacacggggaaaccagcaaccagagtaattatagtggaaccgataaagcccacccaagcggcataaggttgaaaaggtgccttccatgggagggtgtctcggctcacattttgcctcttcattgcagcaaagaaacgaatatagcagaagcaaagagttgcccaggcaatcaaaccggcaacagtgctcaggttcagaagccagctgaatgcctgcgctgcaccaccgctgccgagactcaggtacgccaggggcccaaagagccaggcggtaataactgccacgtatggcacaccattcttgttcacgcgcccgaagatctggggcaactggtggtctgtagtcatggcgacaatcatgcgcgacccgacccagcagtatgagttaccggcggaccacgcggcgatgagaatgcatgcgttcacgatagaggggagagcattgatgccggcgttagtgatggcaatgacgaagggcgagctgttcgcattctcagagccggagacaaggcctgcggctcttgggtccacgatcatgccgatgagaagggctccgagaatatagaagaatgcaatgcggtaggtcacacggcgggcggccttgggaatagcacgatgaggatcaaccgattcggatgcagtaataacgacagtctcgacaccaatgaagctgaacgaggcgttgacgaacgacgacaggaaaccgaggaagtggcctgttggaccggtgataccgttgaagtttgtccacggcccggggttattccagtagcggaatccaatggcgtcgccctgaggaccgccgcctgcagtaatgacaatggagacgacaaccaagccaaggaagcaaagaaccttgacagcacctccaaagacttcggtttcaccataaaatcgcacactcatcaaattgatagccaaaataagcaccaatccaacagtgatcaccacggcaggcgttatatccgtccaatatgaaacaataaccgcggcggccgagacttccgacgcgatggcgattgtgtaacagtatccgtatgaaatagcgagtgagaaaccaacagctgggtcaataaatcgagtcgcccagtgagggaaagatccagcagtcgggaaaagcgttgcgagttcggcgatactttgcatgacacaccacaaaacccctcccacaacaatatacgcgagcagcaagccagcggggccagctttggcgtaggcagcgccagttcccacgaacaaaccagtgccgataccgctgcagaagccaatcatggtgacctgataattgcgcaggcgacgctgcaaggccgcacgaccgccgacattgagctcaaactccgccttgggattcacatcgtattcttcaaaatctgcgcctggagccggctggacattgttattgtggaagccggacttgtccatgttgtcgtgtgtggtggtggtcatccgggccaagtcttccccgtagattataccccggagacttgggaaatgatcaaagcgggttaggtgggaaacagctccctttttcttccaaaattattcagtcgcgtccaagcacgacatcggccctgtaacgccgatttgttctccacagtggggagcctcattgggcttcatcgcccggagttcggcctctctccacttttatgggaggcgattgactaactttttcttctttgccataatcgcaagagaaggcgaattatgcgacattgattggttggcttcatgtcatctcaaggcttgttggcatattgcaccaataagcatgatgcccactcaattgtgttttctcccaggtaccaataattcgagacgcaatgaaagctgtatgcgtatggaaggatgccacgtgatgcgccggatagggttccaagaattcaaactttgggcctgagatcctaggcatttattttctttgcctcaggccttgatatagcgcggaacctttatccgcgggttattatcctaattaccctatagttagtcgtagggggccggagaaccgcagggtaaagcttttcatcaaactgaaaccatccatataagcaactagtcctcctagagatatttgtgttgctttaatgaccacaagggctggtccttctataatcgatcttgtgttaccactttgccatgaaggcttaccgctgatattggcgatacagcggcaatgcggtcaaccgaggttctaacggccttaggaagtgcaattagcaagacgcaccctatctgtactttcagcgtgccaagtgccactacagagagagatgcagattttcatataaatcgactgggttagtggacttcaagtcacatcgaatcgcatatcaacctatagccgattgtctaaatgctctaaatccttacttggactgcaaaagacttcttaaaaatggtatctaaggatctagatattcttaaacggagcatgacaagatcttttattcggaacgaccgaaatgtgctcgagcgccgaccttaacagactcgaaggcagattggaagtaatgcgaagtctaggtaatcgctagcgcaagccgcacactggttaaaattaggggccctgaagaggcacctcacacggccgagtcagccctgtcgtcttttccaatagatatgcaaatacctggtggaagacacgacacaacgactgcactgaaatctctcgagttaattctgcctacccgtaagagattgtcagcagcgactcagaatatctaccgtctactaactttctctagccacatattctcgccgacccaataatccaaccgctcctgtcctggccagcccagaaggctcattagattgtctatgtggggtcgcctacgatagcgaggaggtggaatagaagcagtccgaatggaatatactccgaatcctaaagtcagacctgagttgtggcccctgtctcataggcagagtagcgagcgggagcctccatgtgacagtggtgaatgttcaatgcaccgccacagcagcatggccgcaggtactggtcatgtgataacagccacaggcctgttcatgggccaccacgtgggttgtaaacagattgttgtagccgcccacgaccttcttccaactccttacccctcaccagcgcacacacactcaagcccctcgcaatggtctggcaaccagaaccgctgccttttaccagcaactcgcttcctaaatcccccttaccgagcaatgatgaaatccgtgcttgcacaaatattctcttggatcgcgtatacaaggtagtcgcaataaatgacgagattgtggtgaaattcggcggcggcgtcaaagaatacgagggccaggtcctgctatttctcgagcgccatctccccacaattccagcgccccgactgtacgctatgtataaggaccctgagacgtttgaaacgttcctggtcatgcagcgcatccccggcgagccgctggacgcaatttggccatcattgaccgaggacgagaaagacgatattaccgataaactccggcagatattcgataatctccgacaggttccgtgtcccaagcccgatttctatggcggcctggatggcggctgtctccaccactacatgtttcataaccagaggggcggcttgccgagatccttaggaccctatattggggaagcaaacttcgtcgcgggcattgttgggaattaccgcgtgtacattgaacggaatcagaggccggactataaggtccgctactacgaagaatatctgccgagtctcctcaaggggcatcggccgacgctgacgcacggagacgtccagcagaaaaacattatggtcgcagaaaatagtagcggtcgcaatgcgcaggggggacggtcgtttgatgttgtgatgttagactgggcggacgctgggtggtatcctcaatactgggagttctttgttgcatcctccccgattgcattcatgtactgggatactgactggtgtttaagaatccagcaattccttgaggtttggccagcggaacaggccgtaatgcggatgctggaaaaggatactggtctgtgacatttcaagagcttatagataatacaaataggcgtcttgtgttgacaaaacaagtccgctagccaatcaatttgatgacaaaaattgagtaataaatatccgaaacatcttctcccgccttacatccagacatccatagacctgaagcaaaccagaacctagtacacgtctctaggagcgcgtagtgcgcagaatgccagcattagtcaacgcggggatggccagctgatgcgtccattcattacacttaaagatcggtcgccgctgctccccaggcccatacggttccccattttctttggtccagatatactcatggtaaccagatgccgggcccttcccccagaagttcaatccctgctgcttagacggcgtcggcagagccctcaacatagcctcgattcttcctgatctgaaatccgcccgtggaacccacccaatctgcgggtagctgtgtagatgggcggagacctccgctgcatacccttccttcatttcaaaacgcatgccgcttggggcgatgatgtcgcccgtgacgtggaacattattccatccttggttatgggattgtcttcgacaaagatgccttcgtgatagcgcttcggcgggtcgagagggtcgaatgctgcggtgtcgaaggaggggttgaagaccgcacaccaatcactctgtgcgctggacatgttgtctttgccgtaatggggtgtaggctggtactaatagatggtggactgcgtgtagtcgacagaggctaggtacaatagaggcaagagtacaatatcagttgttacgagtctagagacacatggaaaatgtcagacacagcaggtacaccccttttataacccagcgccatcttcttgttgctaatcatagacaaccatacctcgcacacagattcaccaggctcatactcctgtctgggttgattggcaaaggatgatccgtctacttggacggcttgcagcgccagatgagacaaggcactcgcaatcccctcagctaaccattcatttcaagttgttggaatttggcgccgtagggttgatttaggcaatcgctgcagtgagggtgaatttcccagatggagtagacagcgcttaaatgagccagcgctgcgtaaaacaaggctcttgcagcaccgccgcaatctactggctgcacgtctgccacgtttcttgcttcactttctttgttcccgaaccgtgcggctgaagccccaaaggggaagtggcgctacctcaaggccgacttcacccgctggccggcgcttatgcacgagtggagctgcgatacagctcctgtgccgctttcgttcgtccatgataagctctacaatgtaaacgagataatgaaacgctgtacagagtggcattgtactatgtgacagagctctgtaaagaggtgtgggaaaggaagaagagtaggagtgaactatgcacatggggaaaggtcatctgatactagtgagatttaaaagtccatgacgtggcgtcggcggcaagcaacgcacataggtgataatagtaaaaggtcgtgataatagtaaaaggtctcagttgagcgtgtggtgcatcccattcaccgtgtcatcgttaagtgtagtagtatacaatagaccaatctaccttcaattttcccacgtaccctacaacattaaccttgcggctttgtggccctgtaatttccaacaaaacactcaggctgataccattttggtcaatgttgttttcccagccatattttaccccgcaccttcaacaccgcagattttccgtgaactatgccgtggccatgctgctttccattcaaacagggcgaatcgaatatcgcgaggacagtaagaaccctatataatgagagtgctgcatcttgttttgtcgatgtaccaatagtatctacagccttcacttccactagacgaggagactggcttgaaggtgctgcatgacgggctcagcccaacagtcgagtttgtacaagccatttctatcagacattccgataattaataattaacacagcatcatctctgtccatggtctgaatggccaccgcgaaacttcatggacggcagccaatggggtaaactggctccatgatctgcttccatgtgatatacccgacactcgagtcctgtcctggggctatagcttacccaccgcggaaaacaaccatgagacattatcccaacaggaagtatctgagcagctagtccgcgacttgtgggaaataaggtcatcaaccaacgcacgtactcaactgacccaacaagacaacaagaattagcactgacagagacagcacagacagtcgatcgtccgattatatttgttgcacatagtctcgggggaactatagtcaaaagtgtaaggttatcaattctatgcaaaaagagaattgtctttgatcagtgccaggccctgctttatgccgactcaacccctaccacggaccttcgcagcgtcagactctcaactcgcggggcaattttcatgggcacaccagagctagattcaaggctcattggactgcaaagctacttagctaatgctaaaggatctgagcaggagtctagcgatatttataaggaagcacactggttggtgactacattacagagttacccgtcaatcagtcaacagttttggactttatttgtgcatgaaagctccgactctctatcagtaaggggcacattggaccaggtaagagcattataaccagccagtcgtggactatttgcttatactagttatgttggttttctttgaacaagactgcgtcgttctcaccacaggataattcgtcacatgtttttgttgaatctgatcataatgggatgatcaagtttgaatcatcgctggacgagggatatttgaaaatcaaagagcatgtggttcacgttcagaagatgctgcaacaatcaactgacacctgaatgatcaggccataatacaaattcagctcccgaggtctcatcgaggaaacacactattagcactattagcggattcttattcgacacgaacaatgcagccatagattaaggttattaattgatacatccgagggctctcggtttatttctccgtagcctcctcaataatagggctactccgtacacactcccatcaatctcctttccttatcttctctcggctcaaacaagcccaatctgggagaggcgttcaatagtcggagctgaaactgatatacatcgtagaattatctcacaattacctaacgggtgcagtgccattggccctatggactgagacaagctgtcaacgccaaggcttggattttctcgcaatttccgcttccgcacccacgcggccaagcgccaagtctcatcatgataatgcatggcataagagcgtatgcaggatttaacaccgatccaagacagtaagcagtaggctagatgtcgatcatgtacgggagagagtaagatccgactaactaaataatgaccgcttaagtatacggccttgtcatttggtagtgtttttggtggtatttccatgtcgttttttctctgttgatttgccccttattcgtcctagctagttacaaaatgtagaatcgttaaaaataaataaaattgatatttacatgtgattattgaaataatcctgtcaatagtgccgatcgtccctgaggttgttttcgcccgttgtgttggtcgaagacggataaaatctcgtctcctcattccctcccctttcagcgctaggaatgcccaattatatccaaccctttcagtctttagctaaattatcctcctgataatcccattttcttggttcatgttggaatgactgaaacggaaccttctcagcgagacgcccggccggaggcctccccgctcggctctaacggggaggggtctccctcacccgcaaaggcagtgccggctcccaaggccggaaggaagctaccaggatggcttgatcatttcaatgcccgcgatcttaaggtgctattccgttgctcactagctgcgtgggtcgcgtcgctgttgatctttatcacgccgtccctaaccgtcattggtaccgcgacgttctttgcaacgtgagtgtatccatatatctcctttcggtattggtttgctaatcccgctgttatcagtctggtacttttcatggtacctccgaccggcattgttttcattttccttttaggaactttgaccctcgtccttggcatggccttgggctgggcctggggtgtcgtcgccatgaaggctgctatggcagcgagaccggcggctgagacccaggccaagcttcaagccctgggacaggccgcatacagccaggccaattccactggacagcctgtggcagctgtccagcagcaacttgtctacaccggctggatgcttgatgctcgtgtaacagctgtctattattgcctgatctgtctgttcatatatttaattgtgagagttcttagccccagcgtaatcatcgtgacactaacccttttgtacagtcccgtcttcgggcgacgaaccccaaattcattctgttgcagattttctcaatcatcatcatcgacgttactctgactattggcccgctgcttccatctttcagcggtaccatccctaaggttctgatcgagcctgccgctattggaattggcttgggcctggtctcccattttatcttcttccctcgatctacctcccatgtcgtgcttgatggcatggaggggctggtgcggttactcaaagggcctctggatgccacggagaacagtcttctgaaaggtgaggacttggatatggcggatctgcaaaagatcaaaatgaagtccattgctgcttacaaggctctcaagccggccatgggctttttaccattggacttctcagttggttggtggggtgcagaagacatcaagagcatgaagaaaccaatacgccaggctttgatgagtagtctgtcccttctggaagttcacctcgcccgcctcgggggatacgcgaagctggaaaaattgcaccagctcactgcggatcgtgattctgattccgattcacaagttgatggaaatgagaaaaagcgttcacgggaggtcggcatgcgccagctgatggagagtgttaatttggtacaagcactacgaagcccagaacatgaatccatgcggtcagaaactatcgacgtattgcgcgagtccagcaaggatatcctcccggcatgccaggaagctgtcgagatcgttgcggagtccattcacactgttaacaagcgttggttcggtcgcccttccaaggaacatctcagtcaattgcacgagcgtagtcagaccgcgctgcagaatcttcaagccctgcgcacgtcgtttgcgacggagaccactgaacgtctgattcaaacacatgcagagatcttcgacgaaaaaggcatgctcaggactttggacgaatcatcattgcccagagttagaggtatcacaatggggatgatattcgaagagcaggtgctcggtgtcgtcgatgggtgggagcgggtccttggacagcttgttgctctcctgggggcacgccagaagatccgtctgtggttacccaagggcttgcgatatgcagtcaactggattcgtcgaaagaatgccgtggcgcctgtaatcgccgctcataacccagttatcgaccctgaagtggaagagacgcagtccaaagcggcacagcagcatcttcgcatcagtagagggtatcgtgtcaaccgtggcagccgcttcggacgcgccatcattggcacctatcattggtttatcaacccggaaggtctttacgcaatgcgcatggtggctgtcacgattgctctcgctatccctgctgcaattcctcacactgcgggtttctattaccgcgagaaaggtctatgggccctcatcatggggcagaccacactggtcatatacatggccgacttcaccttctcccttctctgtcgagccgttggtaccattgttggcggcgtccttggtttagttgcgtggtatattggctcaggccacggcgagggtaacccgtatggtcttgctgccatcatggctgttgtgctcacgattctcatgtggggacgtatcttcgcgccccccgctatgcttcaagctatgatgatggctggtgcaacttgcattttggttgttggttacagttacgaggatacgtaagtaaattgtactactttgcggggagcaacatgactgacacacttcccaggcacatcccagcttacggcaatcccggttggggatatgatgttttctggcgacgacttgtccttgttcttatcggctcggcagcggcactgattgtgcagctcttccctcgtccaccatccgcatcgggccacgtttgcaagtccctttctaattccatccgcttgctgtcggaccactacgcgctcctcttatcctgctggggacaagggcgcgaagaaggcctggccgcagagaagctggctctaaacgtcgcagagactctcgccgcactggacgggcccatcgcattgctgcgctttgaattttccagctcgccatttgacagcgagcgtcttggccaggtgaaagcgctgtgccaggaactcaaccagaacatcgctcgcctactatacctatctgcttcgctgccagaacacctgcagagccgactagctcgtcaggctggtcttcttgaccaccacaatatcggcgatgtcatggctgttttaggcgtggttgaacagtcactgaagacgggtgaccctctacccgaggtgctgccaacgccactactcaaccgttgccacaattactggatgtcgcaccatgtggatattattctgagcaaggatttgattcgcgacgaagagtaccgccggttctgcgtcgccatcagcgcatacctcaaattcctggccgccgtggatgacctggtgctcgtgatgaagggcacattaggcgagtcgcatatcgtcagccgcgacctgttggacgaccagtatgtataaagagtgtaaatttctgtaatgataggtgtgttgtgctgggagcatccgtgtatataattgcgccgtatagcgatgtgtcataaaaattggttctcctcattcctccgcacgcccgattttctccaatttttttcttcccccaactctccaaaaccatcctagcgcctttaaatgtcatgcaatattttgttttcttcctcttggtctcctctataaatcattaataactctaatcttccaaaaccgactgcgggtctcatcccatggccactccgcgtctcgcccgtcttccccggtggatcagccactggcttggctatcgcccagagcccgtgaagccactctctacataccaagtcgctctctggtcgttcataacctcattctgtggtctatcagtcgtacaagcaattttcaactactccgactacttcaccgagcgcaatgtgccagggatagtcgcctcctacgtaagtcccacgccacatcaaatgaatctcaccgaaatatctacattgactcacaaaaaaaaaagggtgcatccgcagtcctggtcttcggcgcaatcgaaagcccactcgcacaaccgcgcgctctaatcttcggccacttcttcagcgccttaatcggcatctgcatcacgaaattgtttagtctgatgcccgaccagacgcgcttcgagtccctgcgctggctggccgcttcgctctcaaccgctattgctattgtcgttatgcagttgaccggcactacgcacccgcctgctggcgcgacagccttgctcccagctaccagcccggagatctggagactttcttggtacttcttgcctgttgtcctgttgtcttctgttatgctcatggtttgcgcgctgctgtttaataatttgcatcgtcggtatcctgcgttttggatcgcgcctgctccgcccaagcctgttgcgcctcctgcgccggtcccggtgtctgttgatgtttccttggaaggggagaaggctgtgaagagtcctgtttgatttgggacgttgcggtaagaggtgttcgttccgaatgaccttgcattacacttcgggtgttgttacacggtatatgccgctatccgtttgctgtgagatggtgcatgatgtatatataaactcggttgcactactaatactcgagatctctataagggaaatatattaattactattttttcacgtctaacatatgtatttgtaatattctcagtcgtaatgcttcacatcgtaatccttagaagcagctgcttcttagtagcgatatgctagtcctctaatttcacgctgccaagtacctctagagatatggtgtgggaagtgagcttggtgcagggtcgtatgatcgtatagtaaaggctggggggaaatggaaagctaatagacatcgtatatagacttgacgctacgatatgttccccacaagttttatacagcctcctactcagggttcttcatccggtttacgactcccgttcggtctgatcgtgttggtggatatctgtttcgtctctccgtctactatgtttgtgctcgtttattcaaactaaggtaactttttagggcacgtttttcactttcctccccaccgttttcatctgacttccaaggttgcttgactattcttctacaatttggatatccaaagaacaaatcacaatttcatttcagtcaaccgaaaaatttgtgcaccgctaaacagagaacaaaaggtatcgtaaatgcaaaagaataagcagacatcttggtatcataagactgacagaaaccgagaaaatcctcgaaatttcagcatcatagaaacagtgaaatacccgggaaagtgacaccacgagataaaggagaaccatggagaaacgctctcacgcttgctcctcgaacaaaatagcagaccaatcgctgtcgctctcatcggaatggggaagggaatccaaaggggtaggcttgcaatattgcaaatatcccaagcactgtctgaaatgcagccatagccatccccttggaatagaagcgacacaagaaccatcgagaattgcccgtctttcatatcgttctacacaaactccatcgcccaccgatgttgctgcatctcaaccatccgggcattctccgcagcttcagtgtcctcgcccgcgacaccatgaatagtgaggcttccaacttgcatagccagcatgccgagcagtttcataccgaacaaattgcaggttttggcggtccgggtttcatcttcatcgtaaaccgcaaaccagttcatgtttccttacttcatctctcctagcctcatatctaacaccgtctatgctatactacacaataatgttttactgaaagtgatattcgttgttaagttatcccatcgaaggcctctattgtgtcatagtaccgtaatgagcatacccaacccactgccagctccattgatcttcatcatgtcttgaatgatcctccctgactcggagatctccatttagcaagtcaaacataaaacgcccatcactgtatgaagatagatcaacatgcttctgaatgctaagtcccgcttcagtagtaaccatgaatctccttaaggccgcctttaatgtctatggactgctttcgctttatctccgccttatcgttcctacatatctaagtagtggaatgccctacaagtatctagaggaagtggcaataaacatatttttgatgctaagttccacttaagtagtagccacgaattgcttcgaggccaccattaatgtccatcgactgttttcgccttgtttcggcttttgccgatagcactactcgtgatttcaagttagcataatgcaccacaaatatcgtcagataggtagtaaacatacttgtggttgtgtatgatggagattcggagggtctgagctaatagagagcttttgtttcggcttttgcggagattagctactcgtgatttcaagttagcataatgcaccacaaatatcgttagataggtagtaaacatacgtctccaagtcggtggaggtcccgatagggacctgctgcacgataaacaagaggatgggttgggtccacttaggagttccgggagatccgctttccaccagttaggttggtaaggtaaagcttttagtagtgtaataagacataccctttgggacctcaggacatagtgggacatctgtggatgatgatattagatgaaggctttgatgaaatggagatgacgatcatacttgctgactcaagaagctgaggatgataatctcacaagaggatagaggtgaaggatgaagaaggaaggagagttcaattggggaggggcaggccttttatactcgagcattacgcgcgtcaacgcgcgacttgcgcagttgtacgcgtccatggcaaacagatcaggatctcctaggtatatggggaatagtgtaggggaaacaatgaatgcaaggagggtgatcagtgaaagaattcaagcgtttggcttcgggacacgagttagtggtttaaagcgagaccttccattctttacctcgacaaacattaagcatagacttggtgtcttagagctatcaaactcgtaagtggagctcaatcatagcaaactgtccttgacgtttaacttattacgtaggaattggggagacattggcttagagacccccagttgtctatgaaatcctatcttttggagacatgcacctgtatataggtctacgtataaaaggtcaatgggctaaatgatataatggatatataggaaccatcagttaaaggaacagccttaaaatttaggacatgagtactttatttgaagccaacccttgtattctttacctctataatatcaagcaaagaccaagtatcttggtattgtcagtaccacaattgcaattggaacccatggttatagatagaaagctcctctgtgtgatttatgctctttacggccatcatatacgtcaagaagattttaaaaatgaacactgaaaagcatgttggcatgttcttacatttgtataaaattcctcatttcatcttcgatgtgggacgaaataggtcggattattaaaatcttatttcgtcaaggaaacggaccgtataagcggactattttggttataaaatctgtctcatgagccctggagacacaggacctaggaccaaaggctcgaagcaaacaaataagcgagcaatcaagcaagcaaacaagtttgtttgctccggagacgcgtctaggaacaaagaaagtatagtcgaaatgtcacagggaatctataaaagccatcagcaaaaggatcgaaacctttcggttcgggatacgaggcccttatttggagccggaccttcaatccattagctctacaaacatgaggcatagacttagtgtcatagtgttgtcacaactataaggagggatccatcacgacaaactgttgtcgacgctcaaccaatcataaacgaattgggttagagatcaactgtatatgataccctacctttggagacattcacctacaattatgactacacatttgacgattaagtcttagacatatagcgttgaacgtattatattgatatcaaaggagaacgtgggcgtagatgtagtctttgccctttcccgaattctactctggcacttcttcacggtttcctcgccatataaaataacaatagaatacatctgttcgctcgaatcaatacccatgctcaagacatcctggcttagcgggatgcaattgagttggccattgtggatgttgacccggacaagaatgtagatgggcattgcatcactaaatccacatatagatgattgtacagctacagtagggcctacataaaccggagtcacacagataatgctatagtacttccaaggttgtgacgtgtaaggccctaccccttctcacccgcacgaaattgccatagctaatgagcccgagtcggcggacagtatattttatcgttgaaaatatctcgaaagtcacggtatccttccagtgcgacgtcagtttcttttcttatgaatgcatacggttcgttgtattgctatattgaataatgtctcataacaagttcaattctatcaggcaaaagaaggctggagcttcccacaggctcggtctgctaatctctctttcatgagcacctcatatacatgcgatgcccatccacagcacaccttccgcgtatccttcgggtcgataatttcctcaatcccaaacgcattcgctgtacgaaccggattcatcagccgcaggtactcctcttccaattcttgataccgttcctccttctttccaaccttctcagcttcacgcagctcatgccgatgcccaacctcaattccaccatccagaggcaacgaaccccactgaccagacggccaagcaacctgcatagacggatcacgacaacccaacataacaccgccggccacaccgaagacacgccgtgtgaccacactgaataccggaacagtagtgctgaagtaagccttggcgagctcaacaccccaacgcattgtcgccgtgcgctctgcaacagttccaatggcgtaacccgcttcaaacatgtcagctcgtttcaactgatctaggatgaaacggtatacttacggacgtccaaaaactgcagaacaggcagattcatcacatcacacaacttcagcagccgcgttaatttctggctgccagccgcatcgagtgcccctccattcacttcgcagttcagagagacaatcccaacaggacgcccacccaggcgtgcaagtccaccgattgcagtccgtccccataatgctccgatctcgaaccacgagtctctatcaactacagacgtgatgattgagcgggcattgtacatgcgtgcttgtcgtcgagggatgatactccgcagtgcaatatcctcgcgctcctccgagtcagtacagggtattgttggcggcgcgtcgctcccactgtttggaagatagctcagaactacccgcagctgctcgaagcattctgcctcattggcagcgaggttatcaatcgtaccattcatacaatgaaccataggcccgcccaagtcttggaagtcgagaccttcttcgaatgtcgcgccctcgacaaccttcgggcctgcattgaacagtgctccgatatcagctgccatcacggagaagtgacaagacaccactctcgcggccccaagtccgatctacgcgccggtcagctcagcttgtatcatacaataccaaatggattatcagataaaagcaaagacgaaaagaaaatatcagatacaaacttaccgcaggcccaacaacagcccccaaattcggaatccccatattcaactgctgaataacatacggaaaggacgcaacatgtggaagataactccacccctccttccgaattgtcgtgacactcccaccccccgaactcccatcaacaagcttaacaaccggcacccgcagcgcaatagcaagcttctccacgtagaccgtctttccgtggctcgcgccgtctgcatgtccagaccggatactgaaatcatcagccgtgagaaggaccttcctgccgcggagaagtccggcgccttggatgttattgctcggcacgaaagagacgggcttctcgcgcatcggcgcggtcttttgccatgtcactgtgccggagacggagccaatctcttgaaagctgttggggtctaggagctgctcgatgcgctcgcgtacccatagcttgcctgcttgcttttggcgtacgtagcctcggttgttggggtctggttttgcggctatggcgcggagggctgagagttggcctattacgtctgagtggtctgctgggaggcggttttctgtagactttgactttggcttcggctttcttggttggccttttggtggggatatatgggatgaaacttggtgtagacggtcggtggcttggtctctgcctgttctggtcggtgggttgtcgttgtctttggtcatggtgtatcaattgatatagattggtgtatttcttttattttcttcgactacagtgtacatacgtagaactagagatgtttaagggtttggtctactgagggggtgggcagaccgagggccgaggtcgcccgcgtcgagctataatatcttgttcaatggtgtaagtatcttgcaatgaaatattaaagtgtctaactaatctctatctgaaatataccgtagattatttcgtttattggctttcctcgtgcctttgcatacaattaccccggatttttccccttccaccccaaatgtcatccccgcacacacgccccatcaagcgattgttggttgccaacaggtatgaccctctataacacaataatattagaaggtgcttactttatattttctagaggagagattgccgtccgtattctccatgcagcacgagagctacccgagccagtcgagacaatcgctctctacacatcagacgaccgatcgcactgcgatctagggcgtccacagaatgcgatccaaatcccatcagcatcatcatatctcgacatttccctcctggtagagctagcccaaaagcattctattgacgccgtgcatcccgggtatggattcctcagcgagagcgccgacttcgcgcatcgcatgtggcatgaagctggctctctcgtcataggacctggatgggaaaacctcgcccgaacaggtgataagctgcaggcaaagcatctagcgcaacaatgcggcgtccctgtactggaagccatgagccaacctaccaccagcgtggccgaggcacgtgcgtttgcgactcaggttggtttccccgttatgattaaggctgttgatggtggaggcggtcgcgggattcgccttgttcgcgaggagcatgagctggataatagtattcagagagcgattggcgagtcgccgtctcggactgtctttgttgagaaagctgctgtggacgggttccatcatgttgagattcagattattggtgatgggacgggtcgggtgcgacatctgtgggaaagagattgcagtgctcagcggcggtttcagaaggtggttgaatgcgccccggctttggtgcgggatagagctttggtcggtcgagtgattgaatctgcgctcaggatggcaagtgaaatctgttatcggtcattgggaacgtttgagttccttgtcagtgagcagcgtggggaattctacttcttggaagtgaacccccgtctgcaagtcgagcacaccattacggaagctatcagcgggatagatctggtgcagacgcagcttcttctcgcccagggatacactttgcatcagctgggcctcggtgctgaggtcaacgcaagtcatcctcccccaaatgccttttcaatccaacttagactgtgtgctgaagacccgagcaacgggtttgctctaagcattggcaaagttaccgggtttattgttcctagtggccacggaatccgggtcgatactcatgtcaatgtctctggccccgcactggttgtgggatccaatttcgacaatctattagccaagataatcgtgactgcgcccacctgggaagcatctgttagaaaagcccagcgggtcttggctgattctaggattgacggtgtgaaaaccaatatcaatcttctacgggggatcgtgggccatccagatttcatggccggcagagtcgacacgcaatggcttgggctcaacctcgacgccgtactccagcaaggggagaacatatcggagactctgcgggaactaggtggtcccgccggaccttcacagcaagcggtctcccaaactggactgccagcgtctaatctcctgttccgaaaaggagatgcatggtcaatcacactggaacctctatcgaaggattctcaacaatcagacaaagtggcccaccatctgcgcctgtctcgggtgctgcgcaatgagttcccaagttccctcactgccgaaatcgaatatacgactccgacctcacagggcgcaatcccgtatcggatgcagctcgaaacaaccacgactgctgcatcagcattggtatcctcgtcgcatcgacgaggtaatccaaagaatcctcaccatatcatcctacccctttctggcaaattgattgagatactggtggctgatggagaggatgttgctgaaaatcaggtcctggctttcatcaagcagatgaagatggagctcgaagtacgaagcccccgaagtggtcgggtcaaatgggtttatgagatggaggatgaagaggaggatgtcgctgaaggtatgcttttggtcgaactggagccaaataatggcaatgtggaagttcggggtaagttatgattctgcgttgtgtagactatagaggatatggcatcggtcccctctacaaatcaaattcaagagtcccatacatcaccaacgaatcagctctcagattcgcctggtcctccagcatcattggtctagtggtagaattcgtcgttgccatcgacgaggcccgtgttcgattcacggatgatgcacaagaatttctttttgctttttggctaaggaatcatttaagaaattatgctgtagtctttgaagatgtacggagcatgccctggatagtccgaatacagttggtttgggacgatataaagacgtgacattggtctgtttttcttgaaaggaaaaatatatatatttttgaacgtcgttttctatattctatagatgccttgctagatatatttttctaccctttagatattcaccaatgtttatttaagataattcgtcgcaagtattgtttttgcatgtatcagatggtctcttcctcagaccaaaatccgaattcgagttgtgcgtgtttacctttggcaggccaaggcaggcggtcaagaaaaagcggtcacttctccatgtgacgtcaccgcctcagcttccccatcctctactcttctgtctcctctggcttgaaccagagtaaattctcaggatggatgccctcggtgtctatgtgctgacctttaactgtgcaagaaacgttgccgatgtcgacgtgttcgcgaaccacttcttcgacgcactccccgcgtctggtgcggggagctccgcacccgacctgattttcctctcgctacaagagatcgcacccatcgcctactcgttcctcggaggatccttccttctaccttacttcgatgcattccgccgtgccgtccagaaggccgcagcacaaaaatgggaccaccactatgtgaacttcctcaccgacaatacgggaatgacaggcctgatgcttttcgcgcgcgatgacacccttggcaaaatcgcctggagagacacagctcacgtcggcctcggggtccaggaaatgggaaacaagggcgctgtcggggcacgcctgggatacgttgttgaaggacacccatccaagaccgtggacctcactttcgttgcggcccatctcgctcccatggaggattcctacgagcaaaggaacctggactggaagagcattgttgagcgtctcgtcttctcgcataacagcaatggcagcaagagactagcggagatgtcaagcgtggacgaaaccaccagccttctcgacgatgctgcatcggcgcacgcggagggcagtcgcagagatctcttcgcaccaaacgcctacctattccttgccggagatctgaactaccgcacgtcgaatatcggaccctccattcgagagatcgaacacttcccccgccgcaatgtcgatatcgataacccgtcgcactactcccacctcctaaagaacgaccagctcgtgcgcgagatgggctatggcaggaccttccacagtctttctgaggcgccgatcgatttccctcccacgtacaaatactcggatgccgcgcgtgaagctgtccgccggggcttggacactggtgatcgtgaatgggaatggtcgaatcaccgctggcccagttggtgcgatcgagtcctcttcctcgataagccctcttgggttggtgaagctggaaaggtcaaaccgatcgcttacgatgcactccctctcttcgcacagtcagatcatcgtcccgttgcgctcgttgcatcggtgccactgtggccctctggtgcatcttcaaacactgagaacgtccgggctgtagctccattctctatcgatccgaattggaaatccaagcgagatacggcacgacgaaaggagattgttgtgggtgctcttgcgtacctgggcctgaccagggaaggaaatggactgttgctcgcatcgctgctcggtatcttcggggcgtggttcattcttcgatctatgctggaggtgtgaatggcggtgtggtgaatggcgctcggagagttttctttttttcctttcttttttttttctcagatatcttgccctgtcctgctgtctcttaggtattttcggaagaatgtcatgcaatgctgccagtcgccagaaccggcactggatgagaaagtccagctaataagtcttaccggctgcagtcccaattatgtacaatcagacaatgtcgaagatttagcaacagcctaaactaggcagtacggaccaatgtcacatagtcacatgaaccgagccgatccgaaacggtcatgcattctgcaggtgagaggggttggatttctcggatgaggtcatatatttcttggtttttctccctccgattatcgcctgtttctggcttctccgagaggtccaaggttcccatgactgtgatgactgggctgagactgtacctgtaggtacctaggtagctctgcatacctaggtaggtacaggtctctcattgttcgttgctgttgctgtcatagtaaggtttccacacttcagtctcctccactttgtcacaccgggttttcttattatttttattatttttatttttggctgtgacagtccagatgccgaggtaaaacttcgattgtcttctagactcccaaatgtttctgttcctgaactgtggtccacttacgccgcgacatccgaaaatactgctctttacaaccttggaaggtaaattagatgtgtcacctttaacaaacgtgtaatgcatggaaccacatgaaccggtcaagtgactagcaaggagcttaatttcctctccagacaattttaaagagacacgtctagccttccgtacgaccttgattgccaagaaaaatgtgaagaggtttcatgagaggcggtgtgtggtctaaacgtgtgaagatcttggactgttaggaatccattggatctgacaacattgaagtaagccctgcattttgggcattgcggactactccgtacagatatctcatttcctttggaatgtttctggctggactgaggaaaagaaaaagagggaaaaaggaaaaaaaatggaagaaaaaaaaacgcccgggctccacagcctccacagggatgaaagggagaaaccatacaaatgtagggccaaatcaaagggctattgaattcgattgtttctagtgaagtttcaaggactagaatattggatggtcattggtctatactgatatataagataacgatcatctaatatatagagtagaaagaatagggggttggatatacagtgccaatacataatcaaaacacaaaatgggccaaacgatgtcattgacagggctgatcaggagaaagtggacagcacagaaggatcggaatgttccatgcaaactcacaaacgagcctgaagtggaaaatcgaggaaatcccctgagttcggtggagatttttccagaacaaaaacccagactccatagcagaggcccaagagcccaagacccattgggaatcgaggcttcattctgaaacccggcactctctcgagaatactaaaataagtaaacgaggtgagcaggtccacattatttttctatgttttatgtatctaccaactaaaattgtaggttgtatgttgtacttccatgttcacggaagtcacggaataaatctgaagcttaacggtttggtttgcattaggctgctgtttcgaaatctgctcttgtcagctgctccacctgtccctgcaatatacagatgagactgcgagtcatcccgcgatcttgacgatgcatcctaccgcctgaattttctttttgatggcggatccttcattggcccctttcatgcaccgaagaccagcatttgggccgatcaacccgcatgttcgggtctaggatcatgatcgaccgatctctgcagtagtagaatctactaaatagatgtgtgcaacagtacgacatataacagtataacagtacgtatggagttagtgttatttatccatggacacctagggagtttatagtcttataaagattaccagtattaaaagggaaaaaaaaccgggaagtaccaagggtactcaatgtactcaatgctacctagcaagaagacatagtgattcagatggttgggttagaaagagattaaagaaattaaaaaaatatattgtaaaataatataaaacaagtgaaaaaaatgggtgaaatgggtaaaaaaacagtactaataatactaagaataatataaaacaaaagaatttaataaaaaaataataaaaaataataaaaaaccaacccccagcaaacggtaataaatggaaatgggaataaaaaccctaaaaattcaaaaactcctatttaactgcctaaagaattgtatttgttggcttttacatgtctaagccatctttttgagcctctgatataaacccgtcatcttctccctttcttttcttcaacttctctacttaagtggaatttctaccgcaaccttcaacctccgacgtcatcgtgttgtactacacattctgggccttgatccttattctccgttacatttaatcttgaaaaaaaaagtatctagtcgacttttttctttcccttttcttctctcaagactctttgagaagaattcgccaactcctctttgtcgacatttgatctaaaccccggtcaatatctaccatgtattcctgcgcaaactatccccgtggttgccgaggccgtgtcaaccggcaaggagcgaagtgctccgactgcgttgtatgttatccctaaaaaataatatctttgaagacaaaaggttattcaaagaatagaactaactcccttgacagtctctaaacttgcgccgccctgcttttacttcgcccttcgctcaaccacgcgagtacaagcgcgcgctgccctcagagctctttggcgagctttctaaagcctctgagccagagctgtaatgaatgcaaagctcgcacatcccgggacggtccggagaataacccagctccttgctaggttgcatcctgccggctgggattcacctcgcatgatctacggccgcttcctttgttctttcttatttgcctctcttactctctctctctctccacatctctcatctgcatcgccgggagtttctttgttatatttggcgacctgccatttgctctgatcgcctaatttcctggctttctcatattacctcacctcttcgatctcgtctgaactccctacattggccgggctaatgagtgagcttccacgaatctccttttgggaactgggaaacttggcatggacttcgcgaacatttcctttttcactcgcttgggtttgtttctaggacaaagaacggcccgctattctgttttgcatggaggatagatcgcattttctttttttgcatggatacctacggacatggatctgccactggagggcagtggcgctgatggattgggttctttcaactctccggttgatcgttgatcgaccccttcttttccttgcgcatacgtgtgctttgatattcttttgtttttggtttttatgccctatttttatgttcttttaactgatgttgactctttcctttgtgaacggtgatgccatacccctctgttttacttgcgctatcatatgaccattccccctagtgctatatccctatttacagcattcatactgttatgtcttgaccttctatgccatctcatcttatccttgtataatctagaactagatcagaatactcagccctgtcagcaaagcccctgtattcccaaccccgacacccacttgcctatccttgcagtagcgtgttcgggcctcgatggacatcccctcagccccagtgtagtgccactggggctgtgaagtttcagcccccaaacacccctctcccagacccgacgtggggatccggcacccggctaatcctcttcgctaacatttttcagccgcaataactcccgcgtctcacattgaaacagacatccgagcgccaacataccaaaaaaagaaaaagaattcgcatataccccgaagtttagaaatctgcccgtgcacacacctcacccatcaccgctgactcaacaacacctcaaactcgcacggtacctaggtaccctcgggtacccttcacccttcacacagcccatccatttccatcgtcgcatcaaccccgcccccgactccgctgcgcaatgccgactccaacccttgtaactaaatccccgtcacgatctagactcagcccgaatctgtagatccgcgccttgtcgatgcacgggtggcatgctttttctagtaagtggccgcgcgacgttgcacgcgtacgggttaggcaataaaggcatttgtgcgaggcttaggcttaggcgtagtacgaccgtcgtcgatcgggttttgtcgagagctcatgtcatgcagggggtatccctgtcttggtgggcgcacacatacatagaaatgcacaagctctcggtggtattgcattgacgccgttatggcttgcggatacatcccggggatattggctttcgcttgtgaaagtcatgtgcgggtggttagggggatctagactgaactgggcctggctttttccggagaattattggttccgaggggttggtttctacgatttacgatgacgatgacgatgacgatgacgatgacgatgtgcgatttgctatcatgtgctacgttactaccttctttacgtggatagggcgtgtcataccttgcagacaagactataggaacgggggaaaagggggccgtctactccgtgcaaagttctccgtactgtgttctccgttctccgtatataggagaataccgaaggaagagaactatgtcgatcgcttgtctcagagatagatagttccactctatgttgtgttccatatctgaaactattgtctatattattgtaagctagacattccaggaaacactcaaaaagaagaacgggaaaaagagtgaatccacattccatagtcggattgtgtcagattcgggctttgaatgtaaaacaaagagtggaataagctaactaacgagtctagtgttgaatatccgcttctagcctcttctattggccttctacgcggtttctgttttggttctctagcgtggaaatctcaagccccttttttttcccctgttttgctcggtatcgcgtattttttttccacgctcagccacattccactgtagcggatcgatcgctgtttcaggaactgtggggaatttggcacgttccatcaggggtggtctgctcttgagattttctcgctagtttggaattcctacgatctgttgatcgctgtgtgggagggatgatcggtgtggcgttgcttttcccgttgacagtttggtaaatggattatcgctctatatttccacatttggcatattgggtcacatccctgaacttgaggaagcaagtacctacctaggagagagtggaaatcctagattactttcctaattacgtagattaatactatattaacttgtctccctaatatcccgacataatggcaatatgttatgcagctgcaacaacatagccaatcctccattagaaaatagattagatttcgaaaagtctagaagggaaaagaaaacagggatcacatggaatccaactcagacacctgtgagcttgtctatatccaacaagccagagtggatatgcgttgttgcatgtcgcccgaacacgaacactcgatatccactgcgccctataagcgttcgaaggcacccgtttgaccctctgatccgatacatgtgtcaacccgtcaaacgttgccgtcgtggagatgtacccgatcggatctacacggtatacgcctctcggctaatagttaccaattggttgttagttccggtctggaaccttcggctttggatgataagcacggaacggctgggatgacccaacaagtgtttggccccctggaagagccgctttggggcgtagatcctttaatctcgggctctaaggtagtcgggcacgttacgtggacaccggcacttggcggaagaaatttgcgatggatagattgcttttgccgagagttacagccagtacggagtacggagcgtgctggggctcagtttaatattgacgttttatatattaggctttcttggtggatcattgttcgggtggaggttgcagcctatagaggctcaaaattcaattggcgccttcaatactgcattgtagatgtttctccagatgcaacggtctatacatctaacatctgccggcacacccattgtgcggtctttgtgtggagtgtccaatctctctcatcttccagagtttcggtatctgttgcgtcggtatcattcccacttgcgtggcaggcctttccaagtgcttcgaagacaacaacctggtctctcatgtaactatctagacaagctctcttggcggtggaagcaggttcccggtctggctgggcatttggactctcatctgagatttccccgatgaatccttccacgcatcggcggactagatgtgcagccgcagaaaatggtatctcattttgagaatcatgccgacggtcctgggcttgctggtgtttttgcttccctttgttctttggcttaggcagacgatcacttcctatgccgccgagaatatcgtggcctattctgaaccctgaggaggtatgagccacaagaaggatatacacatggctacggtgatttgtagcttccgatgtgtggattttgataggaactggtgtatctttggacgatgtctcgggagcatcctcttcagctggacgcgatgtagagcgtttggcaaatatagacggattcagcttcatcgcttcacgacggagagtgtgctgagtgaattgttcgataaactggcgaacggtactccccccgccctcttctgcattggcgttcaatgtaggttgatcaggtgctagcactgtgatatcaatttgcgtaactttcccacgtttgtgatccatcaagttaatccgcgggaagctgcatgcaggctcggctgccctgtctcgttgtactgactcctcgggctggtttttgccatctagattatatcgagatcccagcgtatgtatgaggaaagtgactgatccaaggtcaaccggccccgttgtccagccgcgcttatgaaggataatggacaggggaggaagtccaagcttggcaaaattgggcacgatgacttgtgctgcatagtcatatgaaggagaataagaagcgttggttccaccggttatggttactttcacaaagtgagcagtcacctgcgttccaacatgaagcagatacgggtagagggcctggaagacgagaaagatggcaccggcagtcgtgagcttgatgtcgtattgagacttcatggtggcatgcgacaagtccagaagcggtccgcttttcgatctggtggaatgcggaaagaagttcaggcactgggagccaacctcgcctcccgatactttgctaccgctaatctcggccaacagcttcactgctgcagcatgagatctcttgagtcccttctttccctctctgttcccgcgaacatggtcaatactaactggacgaccagtcaatgcagacagcccaatggcgatgcgaaccagctgcccacctccttccagcgttcgaccgttcaaatagacatggtttgatttgggtgaagtagatcgcgaggccgccatttcaggcaatttagttatatttgacactgataccttggaatgcctcgataaatgtgcgaaaaacaattaatatattcatttcgacttttgagttggtcctgagtcagatcatgaggctgcgtcatcttggcgtgagtcaccgtttggggctcttagcgcatagcgaagcttgcttctgctggaaaggaaaccgagatttgaccaagagacttggaaggttgggaaatggaaagaaatgtagacatggaagttgccatggggttatttcgcaccttccgtactgcccaggtggtgatgaagtacttctttccgtgacctcgtcttgaatcttctctctgcaaattcccaaatccgttctgctctatatcccttcttcagtcaatactgctgtacttatatactctgcagacattttgtaacatgttttcctctacatccaatacacgcagcctaagaaggtccatgtccacccgctcaatacgaaaaccgcgacgaccagccgcggagatccccgatgcggctgtgcagcatgcagccactgcagctgcagcttcccgggcaatgcgctcaagtcaaagctcgtctcaggagtcgaagaactcatacgaacgactaggaggtccaggaaatgtggccatccctcgaaggcgtaccggatcgagtcttcggagcactgacgatacctcgtcggttgtccaggccgacttgcccaaagtccaaaaccttcgtcactccaaagaattgtccggtgtatcaggtcgagcgccttgcttcgatgaccctgccgcccttccacccatcacggagctcgatggacttgatggacgagacagctcagttccctcgtcataccgccgactgcgcaaggccaagtcaatgttctcaaccaggcagcgaacttcacagaccccgtatggagtgcctccccttccttgcggtgatcctcttgatcctgagcgcagtcctggattccagctgccacgaacaatgagacgatccgtgtctttccttcgaggaagctatcaatccacacaggttgatccaactgctaagggccatgatgcagctgttcagcttgctcgtagtcaattcgctcagactcccgacggtagaggtgtacaacctcgccggtcatctttcttactcagacgcaagagggagcacaggccatttcgaaagtccttccgggccacaagtgaatatggcgtcgataccaggctttctcatgaattccgatccttttcaagttccatcaaaaacaaattcagacgtgtatttgggttttccaggctcgccgatcaacctacgccaagtggtaccccaaatggcgctgaggtgtccgtagaaactcccattgaaaaatgcacggaggaatactctccacacaaacttgcagtcactgaagacggcattgattctaactatttccagtcaatgccccagtctcccagccacgatagtctctgcacttccaagtcgcgcgtcaccagttgggctgattcaaccaccccgaacacagttactacccggaagccaggacatcgccagtctctttctttgatccgagaggacgggaacctgcatcagcaattaccacgaactcctactatggatgatacggcaaatcaatctcctttggacgtgagggcaaaccctcaccgaattagcatagtcgacagtcaggatctgtacactgcgttgatgaagcaaatgggccaaaattccctgtctggtcccgacgaggagatggtcttcggcagagtgtcccagcatcgtgtgattccagagcgggcgagttcggtctactcccaacatggccgacgcagtatccgccatgtcgcaagccaagaatgttcaacctcgcctggttcattcgcaacagcgcgtgatggtgatcaatccagtccacgaaagtatccgcgctcggctaagtcgatgcaattttctcggggcgtgccgtctcgggtgaagaatcaacatatgactgctatttcagacaaaacatcgccgcaatcaacgtacgctttgagcgaggaatcggatgaggaagatggtagcgttattgtttctcgcactcgggcctcgaaaagggacattgtttccccaagtgtctattcccgaaccaccagtggcaataccccaacaagaactgacaatgtcgacatggacatccatgatgaaccaggaacagcgaccatcttcgctccacagcggacaacatacagctcacccaagcgtgccaatcgtgtttcatcttctatgcctcatagaaaccccagtgcagactggcagcaatggatgagctcacagatcgaaagaattgagcaggcaagccccacaagggaacacgtcagagaagatgcgcagtaccaagacgatgatgagtactttactggcctagctcgacgagctcctgtcgctgtctcggctcgctcttcagcagttgtaaaggttcaagacagccaaagtatcactgagcgcaaagcctccactgagaacaaagtccggtcacagagcaatttctcccgaccgttaatccaggcttccggcatgcgaaccatcgtgccattgcagacaactaagtcagaaaatatggcgcaggctcacgctacctcattgtccatggataccgctaccatgtctggcgaaaatgtttcacccaagccaattcccgctgcttgcaatcaagaaccgtcgccaatacgattgagatccggaaatatgcagccgccagagtccccaaccccaaagggagtgggcctgaagcgatcctggaccaaagagcaacagcgacgctattcagccagacgtgctccaatcgctcaagatagtaggatcaatcatttccggtccatgcgcacccaacgagataaccgtgcaaacaatgagaatgcgaggcagcgggatgagtacagtgacatgatggagagctaccaccaacttcaggacatacattccacgatctctagcaagcgcatggtggatatgttcttggacagtcgccgtcggcaaatgggtgaaatcactgacaacaatacaaccacagaggcttttctttgaatgtgagagacatacactttttgctattggaatacctcggggggtggttcattttttgctctgtcatattctttcggagatcctgaccactcattcactcattcactcatccatcagttttgggacatgtatactaaagctccaggtcggagttgggcagtttgtttacctgatatcgaagcatggaagcagccatttttatctttcattatttccaccaaaaaaaaattagtcgaaacatcattcatttaatatccagccagttcgatgaaataggaaaaagaaacaagagcaaaaaagaaatctctccctcggggaatcgaaccccggtctcccgcgcttatcggtgttaatgacaagcggaaatcatcaccactagaccaaggaagatgtgatggctgagttactgctcggccacttggctggttgatggaaagacttgaccatttagatattatgagggagccctcataactattcacatcggagtcaacaacgtagcttcaatacccatttatccagataatggttgacggcaatatcattcctggtcgaacatgctatagattaattttgttctattcacgagcagggggaaaaaaaaaaaaaagcaccccgaggaaaagaaaatagttgaagctatcgaggatatatatattcttcgattgtcccatagcctgacatgtcaaccacgaattgtatcgaagaacctgtattcaattgcgggggccatgagattgcacaaaaaactcaccgcatccaagagacaaaaggtgtttaattgatcagatatcttcgcatatgcctctcgaaactattatatatggccgtgtatgtatgtgcttccaaccagtgatatacacgcgtggtactaagtgggtcactgcgtgtaaatacgtgttccatgtagggaattcccgtgtgggtatttgccgtgttggtattccccgaataagccgcagccaaccctccatggatgtaggtattttccatgtaggtattttccatgtaggtatatcccttgtaggtattgtccatacataagagaagagcaatggttccgtctttgcgtagagtgacttatccaagggacataacacatttatccaatggatatcttcctcgacattctggatacattggtcctcgatcggtgctacgcattcctctcaccagacccagcggcaattcccaacggagatcttccaaccagtgccaatttaaatcgacatgttggcatttattaccccatgcagccctcaaagtgggcagaggcaagcctctggaagagagatgacattgccagacaagcattgtcgttatacttgatcacatggtaagctctttcaccaaaaatgcagtatcccaacgactgattcagttctccatacacgaaacaggcttttcgcaatgataatgtacctcctcggtagcctgctactataccacacagtgtacgacaaaagactcctccaacacccacgattcctcccaaaccagatcaagctcgagatcaaccaaggcatctcggcaatccccgtaatggccctcctcaccgttccatttttcctagcagagatccgcggatggtcaaaactatacgatttcaccagcgactctccgttcttcggatacaccttgctgcaatacccgttgtttatctgcttcacagatagcgggatttactggatacaccgtggtctgcaccatcctcgcgtttaccgctggcttcacaagccacaccataaatgggctgtgccgacgcctttcgctagttatgcgtttcaccctttggatgggtggtcgcagagtctgccctaccacgtttacccgttggtatttccgttgcagaaaggtgcttatctagggctgtttatctttgtcactgtatggacggtgctgattcgtgagtctgtccatccccgtgaaacgatagaatggttgcttacgctgtttccacagatgacgcagagtatatgccgacatcggtggtgattaacggtgcttcttgtcatacgatgcatcacttgtacttcaactacaattatggtcagtttacaacggcatgggatcgcctggcaggaacgtatcgaaaacccaagggcgatggctttatggaaagccggcaattggatgggaaggagaagattggagataaactcgattgagatggattatcgaagagggcgggttttgtattcgaatgtaccagtataatcgatcgccaatttggcctgttattgacggggtcttcatttgactcgagaggatagtaatatttgttaagacaatgtagggttggatgtctatttcgatttcaattgtcctggccaaaaggaggaaaataaatagccgcgaattgcagcatactcagggtgaaatacagattttccatgtatgaacccggctatattatgttatatccaacctcatgacggagcttggtggcaccattgaatgaattcattcaaattccccaagtcatcggtagcagtgttatccatataccgaaggctaacatcagatctgccggtagcatccagcgtggcattcaacaaccaccaaagctcctgagcgtgtttcggatatccaaggtgaaggaattgatctttatccaggagaccaatgacagaatcccagatgagcttccagttaccagatgcacagcgtattctatcgagagataggtatctcaacaagcccgctctcgcctggaatgcgagggagttaatggctgttgtgacattgttagcaaatcaatcatttggctggttttggtcgcataccgtaaatcagaatcaggagatgctcaactgataccgaaagaccccatggtatccggtcattacttagaggggtttcgagcaactgcgtgaccacgtctttcaggggaggaagcgggagctccgtcgagtgcgacatggcaatcctgctgaaagaggatgcgttttcggcttcccataacccggcactccaaggaaaatgacagtccatttcgaagaccgatattgacgggtggtttttgaagcagactgtgaggaatccatccgctagaaagacccaacaagcgattcttagagctggttagcggtgcacctcgaaagatcggagagaatggggatatagtaccgtatacacgtttcctccgccactaaatttctccaagtcctctcatcacaaacggtgggagcggttcctcgcttgagctgaaaaatcccgagggatcgtatggtggataccaaacatggatgtcggacaatgcgaatgcgacgtcttgtttgcatattgtcctgtccaaattgaagcatctcaataataagagcactttgtagtagctgtacagttgataacaaatgcgactggtctttcgaagcgactgttgatagatctgcaattttccggaatatatactcttctgcgacgtcgaagagaccggatggtagggcacctccatccaatggaatagtatatgtggcaccggataagaatattgagagtaacaaaggattggagatgtttccggggtcgaaggttggaaaatgcaccacgggcaaatgccagtgaagagagtggaaaaacgcagagatagaagcggagatattggagacccccaacagagtagaaagctccatagtatcaagtgggtttagcgttcctgcagtccccagacccattgactttgaagtgtcgaccaactctgtcatgatctcggataattggttggaaagttttgaaggaaagagtgtatcaggactgaactgaagaagataatcgtccgtgaaagagggtagagttgacggtatttggaaaggcgaacttgtaagttggaaatcgccaccaaaagccgacataggataagtgggaacgagagcatcttcgatatgggaattgagtgtttcgaggtttcttcgaacagagcattttgccgtttccccaattgccagcctgtccctctgaaaagaaggatcagcaaagtgttggagaaaagaaaataagccactgtctcttgaggtggctcgcgatacggttatagacggcgagagcgaagttactgtagagcaactgggatccccggaaggcacctcttgggttacgaaagtacattgtcgcccaagggagagacaacgagagcacggtgaatttcggtcgcatgatactttggcaaagaagcatggctcgcaggaatgccttttcctgcccggcttggctgcaggaggcgcaggttggttgaacttttttgcgcaagtcttgatatgtcttcgtgcgacctcactttcgaaatattagatcatgttcattatttatggtgaagatagtttacatacgactttacaaatgctttgccgcacaaagggcagctggaagagggcagctgtgtatctgggaggtggtcagcccaactccgtattcacatttgtaatcggggatcattggaccttacgggtcgcttcatgacgaattaaatgcgtcttcctctgataggccttttcacaaagtgtacattgaaacatgacttcgaaagccgcctttattgcaaagctgaaggaaaaaccaggaaaggggcggccacgaaggtcgcgtggacgaatcccatccgtgcgtggccgaatccttcacaaattccaaggttggcaaatattgatttctgaagtcgcaaaaattggatttcaacttggacaggctattttattattgtcttaggtgaggttcttggatggagactgaacggaatggtgacctatatcaaaatttgtcatttattcgggcaatgtgcgcccgacctcgggagtccttcggagtacggagtcggagttacagcccaaaggcttcaataaactactgaggacaaatgggacagggcttgaccatgccatgctatgtagagtctgcaagggtaagtgatagaccacgctaataacgctgcatactatgatttgctagtgagacgcttcttttggcgggccactagaggaagattgctgatcttatgtttgtgatcaacaattcaacgtgggatcatctctatattgtagttcctatgttttatatctatggtatatgcaaggatatctagaaaaaccacggatatcaatgaaggctggacacccggaggagaattacctcaagcgacagctctcggttcctagtcactttcccaaccatgaagtaagccggttctttttaaaatctatttactatttacgccatgggagcaattttacggaagtttccgaacccctgccgtgcacgggacctgcatcgaacagatcagatcattagtggagcagtacaaaaggtttcctatgctgtagattaaggtatcatatccactggtggagagaagtcccattttctcgagcacacggtgttcttcaatttacaaatccatggagatacccatgatctttgtgtatgaaaaagtccgcaacggatgtattcaggcgccggggtaaagccggggatcaaagacaacgatgcccagactatagatcaggctccacatacggaaacagacgttgtgggtcagaacaagattaaaaaagacccaaaaagatccaaatggcggtggggctcacatctctagcgcagccaaggtcaaggactctaaggattagaaccatggggtagtgccgaattagaccgtaagtctcaattcctgtgcaatacttcggcgtccgatgcgatgtacaacatagtgcttggttcgtaaggagtacataatagtttgcgctggactggaaagaaaaagcgagcaggtttgattggctgcagatttatttagaaatgcagcgtacctgactaggaatccttgcgctccagtagccgggttctgcaccagctaggaggcacctgatgactggtccgttgggattacgggactccaacttagtggaacagtcattttgctggtctaatttgggattattcggcttgtctcatcgaatagccctatattgaaacttacaccttgcttggggtagcccctgaactgagatatcacgagcacaaagaactcatcgagatacgttgtgcatatggggatatgtgtggctgaactagtttgggctagactgccagcgggagcaatcaaataacgcgctaattgcattagcggcccgggaaggaagtgataggtccagcataagattgggatatcaggtttggttcattcaccaacttgtcaacgaaaaacgaggaaatcacgagtaggcaaccaatcggaacattagttccaagtaaaatgggctggtctagtctgaacttctcgcttggcgttcctttttgggctagataatagcttgcgatgtacagagtacgaagcgtcgaggtttgctcccctattttaaaattgctataatgactgcctggtgggttggcacatataaggctggttacctctctggtttattcctgctcttcatatcttcgttgtcagctttttgacctatcactcgttttgcaggtcattcagcgtccattctttacttcgggctgaatagacttccaacttgcaacgatgaagcaatccatgatcgcttcgcttgtggctctcgcagcctcgtcctcggtaagaaaattccacggagggttgctgttgtatatagatctacagctaacacatcaccccatggtatagggagttcaagcggctgatggcttgattaacgtacccgttaatctctgcgcagccatacttggagtggccgaatgcaaccagaagaccgtgacaaatggattgatcgacatgcctgttaatgcatgtgctgcagtccttggaaaggcccagtgtgaacaggccgctttgtcttccaggagcgagggtctgattagcgtgcccgtgaatctctgcgcagccatccttggagtggccgaatgcaaccagaagaccgtgacaaatggattgatcgacatgcctgttaatgcatgtgctgcagtccttggaaaggcccagtgtgaacaggccgctttgtcttccaggagcgagggtggtctggttagcgtgcccgtgaacctctgcacagccatcctcggagaggccgaatgcaagcagaagacagccagcagtgatggcttgatcgacgtgcctgttaacgcatgtgctgcagttcttggaaaagccaaatgccaccagatctcttctcccagcagcagcggcggcggcggcgacgaccatgacgacggtgctctgatcaatatccctgttggactctgcggagccatccttggagaggtagaatgcaagcaaaagactgccactgatggtggcttgatcaatgtacccgttaacacatgcgtggctgccctcggaaaagccaagtgtgaccaggcctcttcctgtgacagcggcgacggttcccttatcaatgtgccgatcgacgtttgcctggctgtccttggtgaggcccagtgcaagcagaagtctgactcaaatggtggtctggtcaacatccccatcaacgtatgtctagccgttttgggtgaggttgattgccatgatagatctcccccgactgagattccaggcaagccaggcaagcctgatactcccgtccccgttgtccctggcgaagtcccaggaaagccaggcaagcctgacaccccggtccccgttgttcctggcgaggtcccaggcgaggtcccaggcgaggtcccagggaagccaggcaagcctgacaccccggtccccgttgttcccggcgaagtcccaggaaagccaggcaagcctgatacccctgtccccgttgttcccggcgaagttcccggcaagccaggcaagcctgacactcccgtccccgttgttcctggtgaggttccgggcaagcctgctggccctggtgagactcccgtccccatcgttcccggcgaagttcccggcaagcctgctggccctggagagactcccgttcccggcgaagttccaggcaagcctactggccccggagttgtccctggagagactcccggcaagcctgctggccctggagagactcccgttcccggcaaagttccaggcaagcctaacggcccaggtgttgtcccttccggcactgtagcacgcccatcccccaccggagcttacacccgtgtgactcccacctacactagtgtcgtcactgtctgcaacgccgcctgcaacgcctccaagacctctactggccttgtggttcacacttctcctgcatctggtggtagcgggagcaagcccagccccagtcacacccctagccccagccccagcatcattccgttcaacgaggctggccgtgctaccttgtccggtgttgccgtggtgttcggagctctctgcgctgttgctatgcagatctaagtcttgatttaagctcagatactggcgaaggcgctagctggtggtgacttttccgatcgttcaatgttgagattcacagttcttgttgcgttgggcataccagtctgtctgtcttttctttttctccttctctgttccattgtttaaatcagcataagttaatataatcccacgatatacgtctatgaattcacctagttgttcttgctattaaagctttccatgtgtatatggtgactttattggttacatcactttgtatatgccaagggaggtgtttgtagagtttagcagttccacgggtgctgcccatcaatccgacgttagcttccagcttaatcgaacattggagacttttacaaacacctttttttctaaggaaaagaaaaagcgaattccaaattcattcgttctgccaaaataaaaggacaaaagggtcgaatgtgaatgaaaatggcaaaaaaatggcaaaaaaaatggcaaaaaatcctctgacccgggatcgaaccagggacctcaagataacaagttccatgagaacacgtcaattacagtcttgcgctcttccagctgagctatcagaggatgttattgacagtcctgcatcttataacaataaagtcaagctcaacgcaaccgccgcattatccttggctagcattttcctcttcttcaaaatcactcctgaaatatgtatattgactttggataggtaaggaataacagatgcgtctttctggatgcctatgaagctcgacaagcagctctgacctctaaataggggcatgtttcccagcatgtcatcttcgttgtgagggcgatggacagtctacttgcgaagctgaattatctgtgtgtgagagtacgacatcaagccctggttcccccactcgcctccaatcccactttgcttccatccagaaaggtagccatatgggttggggtcttcagcgctattgatccatacgcttccgacttcgactctccgcgcaatgcgctccgccttgccaacatcatccgcccagacgcagccccccaagccagtttctgtcgcattgacccttgaaatcacttcatcctcattagaccacttcatgagcgggatgacaggaccgaactgctccaattggacgatgcgagaatcatgtggtggttgatccacaacgacgggtgcgatgaaaaaccctgggtgctcgtcggtagtccccccacaaagtaaagtatagttgtttttcttgcaatcggcgatgatatctttaaccagtctgtactgtgactcattctgaatgggactgaacataggtgactggtcgccagcaaggtcgattttgatgtccttgactgcctcaacaaaagtgtcccggaattcttggaaaatggactcatgcacatagactctttttgtagcaacgcacatctggcccgaatggataagaactccggcagcaaccttagcagcaacggctttgacatcaacgtcggggcagatgatacatccatcatttccaccaagctcgagtgtaactcgctttagagtcttggctgcgctttctgctacctttcttccagtcgcaatggatccggtgaaacttatcttgtcgatccccggatgaagtgtaatgagccttcccatatcgtcgtctccattaagcacctgaagcacaccccgcggaagcactgatgttgcaagctcaacgaacttcaaagtggcacatggggtggatggcgatggtttgacaatgacgcagttacccatgacaagcgctgcagaaactttggcggcggctaacacgagcggaaaattccaagggcaaatcgcacccaccactcctataggatgatgggttgacacgatcttggttttatcgttttcgtgttcgactttgtcgggcaatgactgggatgctggaccagtcagcttttgcagccaaacaacgttcttgaatgtaaatttgcgataccattaaatctgataaaagccaaagtatcattaatctccatgtttgcgaggaggttctgggaagcttattagcaatatttccaatattcacaacatggaaggtccttcgttaccgattttccggtctcccctgccaaaggggcatgtatctcatctcttcgctgttctagctcatccgctagcttcagtaggtacgtttgtctttcctcgatagtcaagagcttccatgatttaaatgacgcccttgcagcatcaactgcgtagttcagttgcgtctcatgtgcgactggcacatcccagagaggttcatcggtcctggggtttgtgactgttgtagaatctccggagcggagctccgagtcgatgatattgtagaacatttcggatcttaggaaaaagagcaagactcgacatgggaacctaatacatctgccaactgattaaatattgaatgccagatgagcagtgggttgacgccacatctgtgacgggattcctacctcattttcatcccggataggataccagatggcgcgggccgagtttgagacttcggatgtaaatgaaattaggagctataattagctgaggagctgacgtcgacattacgagggataccaagagggaaatatgcctgaggcgtgggggattgcaagcgtggaaggaatttctagagaagagccacgaatctcaaaacaaacaccatatgctgagctgagctgtgttttggaattaagtcagagttagccgttgcatgcccagcatcctgattatgcattaattacattggataccttgaaagtctacctagaaagtctagctaaaaggacacgtaaggagtctgcggccgcataaccaggcaagtattcttgttgtaggaattggctatagtaggaactagtactatagaagctaatactgcaaggactaataactagaactttgtaagaatgaggtgatgagtgtgtggaaggcggccaaatctaaaaaccatagaaaagtacgatacggtgcactgggggttggagactgcctatctccctccctttgctatgctaactaacgtgtcatgtctccaatacatttgcgcttcttccttcaaatcaaggtaacgtgtattatagctctaactacatgtaggtaaagtaccttcttgtttgaacaattgatattggcatgtcgctaagcaatttaacggaacaagcaatccttttattatgttacaaaagatccaaattcatcggtcaaagctcatcatgtggatgatcgtaatcatctgcccatatttcaggattctgtatgaacttccgagcacgatgcgcgcttccgattgcggcgacatacgccgggtccagctggtctcgaagcataggaatccattccatgggcagggcctgagaaacgatcgaccggagagaattcatcgcaggcaacggtgcttcgccacttacgatgaccgctcgaacgtgctgcgcgtcatccgttttcttcagattagagatgaaattgtgaatgacctgcgatacccggctctgatagtcatatagattagagtttatagatgaatcgtgaacaagagagaataacaaacctctgaatccgccgggtctaccctccatagtcctaagtctgggtagcgtgcgtagctatgctcatgttcaagtgtgtcgactccgagttctgtgagatccgcggtccacaaatccagggaatagccgttgtaatcaatgtaaacagcgatatttaatgggccgtgcatcaaatcaaagtcaggaggatacccaagactttcgggtgtatcaagactataggccaagcgagcagcattgaggaaccctagcagctgccctgggtgcgtcaattccggagccacatccgtgcctgttagcgctgtcaagacgtgatctctggagatggtgtccaaatccgagggtaggctgacggctgaaatcctaacagggcggcctagtgtatgattcgcagccccggtcatgtgccgcagagtatcagagagaatcatgctatcattcttgctgtagccttgatactccttcggtgctgggatgagtccatctccttcccgtaggaagaccttttgaaagcgcactctgggaaaataggagatatgttagctttggattccacttcacttggtcttccgggtgcattaaattacactcttttttgagagtcagtgactagactctccatgtgcttttgatagtccgctggtgcctcaagtttcgccaccgtgatcgattcattagatgccgtgtagtaagccgccgtgctagtttgagattgcctgtttagtaaccaaggtctccggccctggggatagaatcagagccacatacatgtacttaaatccgaagttaacaccaagggctgtaggcagacaaggattccttatgttagcgtcaagtacaattttataaacagagtcatccatacgatagtcgtccatagcaagagccagcgtgacccagagcagaagccagcgtagcgtccacatcatactcatggccaattatacgtgaagaagttagctgatcagtcgaaactacctaagtagactcgaggcttctttttaaaaggtactccctctacggagtaggctttaggtaaatggcgtgattcccaataaagtactgcaccagaacgcaggtcccaccgaaattcactgggagttacctaatcgggactgatctccagagctgtttcggcccccacccgcacatcatggaaggaaacacgtttgaagagacggagaacgccggttatttgtcccgtcaattccgttgtgggtcgcttgtcaggaggctccaagactgtgcgtgggggctaattacggttccaggtaaggttgtggatgatctgcggagcctcatcctatgtacatgtggacatatatcatagagaccttccattataggtagccttgtgtaggtcataatcttcgttcaaggaaagatcaatcttggggactctttccaaaattacaaatactcccccctgatggatcaaccctcccctcacgcgaaggaagtgaagatcccaatgaagaagcgtgctagccttatggcttgatctccacatcccgactacaaattcctacataaatatgctgtcaagggtacctctttcatttctggcagcctctcgagactgaagctggttcgtgtgcgaaatggcttttcaattgctacttgttagcatctgtctctcctttctggtgaatccatcaatctccacccctgtgtcgactgacgggactacgtctcttttcgagagagaatgggtccacccgggctacttggacatgttgcatagtaaatggaggggcatctactttaccgatgctgcggagacatgctcaagcgagcaactcgatacattagtcaagactcttgaacaatcccataagcttctcttgggacccccgtcatcccctaaccctgcgaaaacccctggctggaaccggttcttcctcaatgatgataatgtggcagacgatgaaggctggtcggtaagtttgcctggaatcctctaacactagcatgaaactaactggagcgacctatgtagggcgaagctcaacaggatgacttcatgaacgtcatgcgtaagaatatctatcttcgcctgcaacatatttggctaacaagatcagacaatttccagcaggcccagcatttccctgaatggggtactaactataaatggaaaaccatgaagcctggaagtcggatcacgtttacatgcaaagaaccgaagatagccgcaaatcgctgtaaagacaagggctcgtaagtccgataactattgacaagaagagcaagtcattaatgagtttaggggtgcattccgcttcccaggaagtcacgccgattctgatggctacggcgatgttatcgtgttttgtcccgcagtcttcggaccgaagtacaaggacatggatgaactgattaacggccgccggaagtccatttcgtacctaccccagctatggacaaaggcccatgctatgacacacgagatcttccattgccagcgagcgcttaaaacccagttcttgagtaagcccggaatacggcgtgtcacgtcgactcgaatgctaatgaacgtactcagttacggacatctatgataacgtcgctggcattacgtccaaaaaggtatgattctttcttgcttttctttttttacaaaaaacttacgatatcaccaggccgtctatgggccagagtactgcgccagatacgcacggaaaaacgcggtacattcccgcagaagtcggaacagaattaatacgaacgtgaagaagaatggtgattataaaaattccatatttatctaaacacgaaacagacggagctgacattaatcacagctgatagttacgcatggctcctgagcttcaattggcttaattattacttcgactggcaaagtaacggcgattacgaggtggacatcatccacgacgaagtcaagcgcgacacgcagactgattccactgataacgacgctgatattgacgttgaacacgatcccgatagcatgctggatggcgactcgattgatgtcaatgaagtttatcctcaggcaaactgtgcgcaagtcgggagcgatcccatgaacgtgaagtgcgagtatgtggatgaggactatgacgactgggtcgaagatcatccgcatccatcagtatcacgatccatggtatcggccacggcgacccctacctcaacaccattggtttcagccacacctacacctaccccttctgcgaccgggtcggccacatgtgaagtgatctttgaggatgaactgtcttccacaaaggattggatgtacaaggttattgtgagtggagattgggccacacaggacgcgatcaaatctggtgtggaaggctgcgtgagcaactccgacgaccttaccgcctggatttgggaggatcagggagatgggacgtggatggctgcattcgaccttaagaacttcgaggacgaaaattgtgtgccggatgccatccaaagcgcatcggatgatctgatcaaggatgtttcgtgtccagtccacaatggcgcggaccctactctctcaactcggttgatgatggagggtgcttctggataatccacgagcttcctgcttatactgggttttttttggggactatgtgaagggtcgaagatgatgggcgtggctggagataggatggatgatgggtgagaagaggattccatggaaggccagctaatctatggggtgacggttggcagctggcatccatcgtccttgacaggtttcaaaatgagagaccccttccaatgtacttcctacaatcaaaaataacccagtttgcccacgtgtcggacattcactgagtttcatagatgctgacttcgtagatcgggtattgaggcagttgataatcagggtgatgatgaactcattcttgaacccggagtttttgaagaactgcgtcccgtagtagatgatgaaattgatccgggttagctgctacagcccttgcaggaaacatactggagcgagccatttcagcagatcgccccggaagcagtcgatgtatcccgactcgccaaggctagcctcataccggtggtttgcctggatctcggcgagctcccggaacggcttcgtgatcttcggggaggcgacggagtcgcgagaggctgcgcgctgcggcttcgttgttgtctcgcttcactaggtagcgtggggttttagggagaatgagcatgcctaccactagaatgatagaccagaaaaaccggagggcgatggggatacggtaggaactggagtcgtggtgatcgtgcgttgcgttgtccattactgatgctaggtgacgatggtgatagtgaattggtacgtgccgacgataaagtctcggatccatttaggtgcggtctcggactggtagagagggacttttgggtgatatcgtaactgtcagtgcttggataggtgaagaaaggaaattgcatggcaagtaacatacccagagcagaaatcaggcccaccctcaagcagacaaagaacccttcgtcaagaaagggcggaatgtcggttgcgattgtctgcaggattactcccagagcaaacacagcatttgacgcagccagactggccgggattgtccctgtagcccgcggagaacgcggcagcccaaggaggcatgggaggatgccactgatggtgccagtatcatagctagataaacacgcgcctggtcagagagcgcttccacgagatggagatgtctaccccccgcgccagctatggcacccacccaaacagaatccccccgaaggtgacgataccacttataaatatggcaggccaggctttgctgcagtttcttcgggcttttccaacagaacgcccatggtatttatgtaacggcacactcgaaaggggaggaacaggagagtattatttgagaaaaactgatatggaagaggatttgagctatttaaatgtgtctaggtctctcggttatagatatcattatatttggacaatgattgtcgcagaagcaaatcagcttcaacgccttggaatcgtgcaggatccaaggcgtccagcagagccttatcttctgaagttgtcgcattctcaccatcatcaagaatctctcttgccaatagcttagcagtaccagcagcagttgtaacccaaatggctgcagcaagccatagattcgcaacatcaggaacccgacccgcgaaaggcaggttgtcaggcgtgacagaaaatataccattgaatggcttgtctgctacccaaggctcttctgtctccatgttctgtccctggacctggaattctgttttgttcttcgggttcgaacaggcttctgacagcacttgatcgaagcttgatggccaagctccaatcgcgctttcagtgggatcaagctgcatcgggggatgatcataactgcccaggccatctcggtcaccgtggtcccttgcatagacgtgatggtccagccagcgaacgaatggataaggggcaccgacacgtctagttcgagccggagtaaaggtgtaagggtgtgcgacggggacgatgggaatggggagttgcgtaacaggggtgctgccattggaaatcaaggaagatgtccaaatgccagtagcgagaatcacagtactgccttccgagttgatatctccgctagcggtcttgatagccgctatcttcgacgtttcgttctctatcgtggtcgcaaagcctgttacggcggcttccaagaaatctacccctctggtgcgagcttggtcgacatagtaggaagtaatgacgcccgcatttgcggttccatcggatgggaaatgcagacagtgcttaatcgagttggcgtcaataaaatccggggcaagagaggcggccgcttctggggtgagaagctccgcaggtagaccagcctcctgcgcgattctttgccggcgcgttaatgtctccaagcccggaggcgtagaggaaagttccaagctgccgactgtttcaaagccacccggaattgtgaggtagtcctggactgtgtctttagccaaccgagtcaagaccggcgactcattgagttggccaacgaatcctggagcgtgaccggtggaacccaatagagtttctagacttttgtcgatgagtataatatgattttcagtttgggctttggaaagatggaacgcgagcgctgcgccgacaatgcctcccccaacgataatgatctggcgaggagagggattgctattcaattgcgcgatagtcaatgtagacggcatcgtggaactgtgtttaaaattttttaactgatttagaaagggtgagtacaatgaaagaggccctggatagtgatcttaactgtatagatggcgctatgctagcccgatgtcggcatccttgtcccctcatatatccgcccccaaccgcgcttttgcggagttgctattgctttaatcgttagtgattggttaaaaagtgagccaagtatgtttaattgtgacttggatccgctcaagtctcctcggcgttgaacgatgactcagttgtcatggacagaccacgttgtctcagatcgtaagacatgttgaggcttcgagcactatcaatggcagattatggagagtgtgtaaatgcgttaagctaaatgttcctggagcatcctaaaaaactcttctttagcgtactccgtacctaatttatgaatgtgaagacgttcgttaacatttggtattctgacagacggcaagcggggctccagaaacggctcctattgccctcctaccatcgcctttcaatatcccattccctatgctgagaaagtcctcgcagtcttaagctgttttccctggtacgttgcatgcactgtgagtttggactggttattcctccgaacctccaggggtccctactcggtcatcttcgcccgagatagactgttgcttgacctcaaccagaggaagagactttttggattcttggttttctccgatcacttgtccaccccctctcccgttgatgctgtctggaatgtaagatcgagaaatgactcgtctgccctgttttaactcttacaccagctgtgaagttggcacccagtctccgctctccggttaggaagggcccaaccacttgcaccgtcactggcacaacttcctgcatgaggtatagggccatgcactgtacaaaagcaatgtggctggcaggattaagcttcaagcgtcctcgtcaaagtcatcgaatgggagatggccagggactctggcaaactgcaggaagttaaacagtttttcttcgtcaaacgcacttttttctcttttcgcggccctatcgacattcaaactcaacatatatcagagtactatgggggcattttgcttacttgtggcgcactttagctatactgctttacctctcgtcattcccaatggatggatactcggctaccgtcacaagagaagcctatgagctatcatgagttccctatcccacgccggactccaactgcaactattcaagatctgcggtcctcctaaaaaaaggacaacttcttcagcatgctatttttcgagacacggatgtcaataaagtcatatcaatgctcattgataagagtgcacctttaaacgccgcgatgcaccaggacgggcgtgctttgatgcgattctggcctatgagcctggggactcctttgcatattgtaacagtccccgggagaacggatgcaattcgtcatttggtcaacctcggcgcaaacactagcgtcaaggacgcgaacggccgcaccgccgtggagtggccacaacggttgaatcaaacggaagttgtgagacttttggggagccaattgtgaagaaatatctcgcaaaatgagtagagggtaggtcgcaatctagtccatcactttgaaatgttctagatgtcccttccccgattctgtccgatgggtgtcgtcagacgttaaacccagatgaaatattgctatgcctttacttcccaacctccataccttagcgttatattatttacacccagataatgtaggttcccttgtcgcaaattattgtgagactgcgtgtcgcatccagaattttcggatcttgctcggaccagactactgcgaaacacgagctcgtattctggagatcttcggcccgatcgggctagcatcgtgaaatctctcccaaactgtacgaggaccggaccatccatgtcgcaccgcaaggcccatgtagaaaggttgcagctgaataacttggaaagcacgccgatccttgtactggttccttaagtgctaggtccgacacggatctaagcgagatgatcaggagaatcgagtgggagtttctatatttaaatcttcacctcgtattatcatgcagtagctcgaaaaagacccagatatatcaccatcgagcgagccgaggttgtagagtaagatgactacttaaggcatgaattggcctgtctacacgagcccacacactacatttttctaataagccccccatctctggtatctcgccgacaatgcgagcaattaaattcctcctcacagccctaacagccgccgccgttgcggtggcccaaatccccgactccaagcgcttcgacctaacaacaccctcccacgacctctggcggcacaagaaaaccgccgcctacaccgtgcagcaatcaatgaccttcgacaacgtcaaccgccggctcttcatcgtgaaccgccgaaacggcgccagcaccacttcgggcgacctcaccatcagcgaggtcgacttttcaggaaacctgctcggatccatggacttgcttgcctgcggacacggggtgaacattgccgccgagcccgtcggcagcgaaacatacatctggtctgagaccgacgccgcagccagcgggtacgggactgcgctgtggcggttcaagttcgaggacgggaagacgctggaccccgcgaaggatgacagggagcgtatcaagccgctggggaagttcgagcggggcacggcgacgattgaccctgtatatgaacggttcgttgtgcggtatcagtacgacaaatctatgtatattgctgtatgggatcttgatgatgctgtttcgggtaatttctcgaagccgcttgttgattggaaaataccgaatgtcaaggatgacttgggtgcgttgacgggtgtgaatcagggctatgcggtgtatggccggtatctttatttacttaccggggagtcctatgaggccagtggcgggaagcttaactcgcaggtgttgtcgatggatttgaatacgggagagctggttcaggggccagttatgacgaaggctgggtcgacacttgagttccgggagccagagggcctggctatctataagactaaggatggtgaggcgcgcctgttcttgggctttgcgtctggggttgcgggtgaccgccgcagcaatttgttctataagaacgtgttggtttagactcgagccttgtctgatattattatctatcccagcactcgacacataccagtgaaagggcaaagatctttgtttaatgggaggatactcgattctctgtcttccgagcgcatatagcggagagtttcaaatatatcaggacttctatcgcaacctacccctatagcctataggcgacataatctgttaggtatcagaaggggataaaggatgcgaggtagaaacgcccgtgctatcgaatcttttctagtcttcctcttatacttaggggaagtcaagccaagagacaatgcacttaggaaaaggtcgattgactaggtttgtcggtatcccctaggtcgtcagggtcgtatctgtctgtctcaagtctgatcgctcgatgtaaagagcggtgatggcgatagaaggcggaataactagtgtcaggctacacttatacctaggtagctctgtctctccctagctccgctctacctcttctcgcgtcagtctctctttcttaaactgacgccgtagctcgacgattatttattccatctcttgtcggatataatatcggcagataattgaatgacgccaattgaaattaatatagtgggggacccaccgtctagcacgaggaatgaaatttcacgagtgagtgtgcggtaatatgcacccacacctgcgaattcccacagttctatttgatttttacatatttttacatatattttatttttggctttggtctcgctcacgttcacttgtttcttattactatttgtggtaattacccctccaggaaggtagctttaagggttagtagtcggatataattatattcagtcgtgtagaatagttttggcaatcgagttaatgccttacgccttgttatgcactttctatgtgtcttttttgaagttgctttaagcctcatcagttaccatttaacatcaaaagtgcagacgagtcggtcctattgaacttccgatagagaagaacgggttttgtactaaatatctctagaattccgtagtatacaacaaatactagaacaacaagccaatcaatgtgcccgttccatgtacaacataaatgtaccttactgccaagtcctaactgtcgttctaacccagtgcaggtggcccgaggcgcaagtcttcgctccgcgtccagattcgggattgccccgatatgaatcccgagagacgttgtgcttagttagttggacaatagaatatacagatgacaaagttggagccactacaatatattccggttgcttgagcacgtaaactatagcaggccttgtactaaaagtcagacaaccagatcgcatgatatgaacatactcttgggcgccgcgggaaaccgcgggaacttcaaattgctttcataatgattataaaccaactgacccctcttccgaaagagttctgctatccgaggacgaagcacggccgcgagatactgagccggtggacacacctaaatcccgaaaacgcgggataggttgtagccaccgagtccaagccaccaacttcagtcaatatatcggtagaactaacgttcaggtcctcagaacatcattcgtcgctttgcgggcatgccaagagctagttccagagtgtccctaggtaggcagtctacagtgacgtcgccgggaggcactaacccgaccaacaaactctatcgagcacccgaagtatcgccggcgattggaacacatatagaggggaagatgccggcattctgtctccgatgaagccgtggagtaggataccccgctagccaagtctagttgccaaggcggtgatcgtgaaaatgtctcgtgcttaaagttgccatcctcggaccatgcggagagcaaatccagaagaaattaaccatcggtgagagttaacggagtagtagatagagagactagtctagagagttcagaaacgtcataagttgtattgcgcactgactttgcactgactctgcacgcttgtgtacgcttgcagggacgaagaagttttccccacaaagcgaaagtgtgtggggtccccggaacgccaagacttggtctcggcagaactccgggttgggacttccctttggaacagttgcacttgccggttgaacggcgaaattatcttttcccccatacgccaagtaatttctctccggagatggactgcgggttgtggactgcgggttgtggactgcgggttgtgtactgaagattataaaaaggagtgaatatcccatggcatctccggagactgttcctccagagactcgagctcctgcctgaggaagttacaaaaaatggctcgcgtcgctcagtttgtggtttcaggccttttggctgccacagtggccaatggtcaatcatttgacgggactagccgaagtgaagatgctttcagttatgtccagcccgagaacacaaccattctgggcccttacggacactcccccgccgtccttccctcacgtatgtttctcttcgatagttctctataactgggattttgctgacctatgatacagcaaatgctaccggtacaggtgaatggaaggaagcctacgccaaagctcaagagtttgtcgccaagctcactatcgatgagaaagccgacatggtcactggccagccaggtccgtgtgtgggaaacattgttgctattccacgacttgggttcccaggtctctgcttgcaggatgggcccctagcaattcgggttgctgactatgccagcgttttcgctgctggtgtcaccgtggcatccacgtgggacagagatctcctctatgaacgaggctacgccatgggacaagagttcaaggccaagggtgctcacgttgccctcagccccgtggccggcccgctcggccgttctgcctacgcaggccgaaactgggaaggctttgctgctgatccttacttgaccggtgtcgccatggagaagaccattcgcggtcaccaggatgctggcgtgcaagccactccaaagcactttatcggaaatgagcaggagactcagcgtaaccctacctacaaccccaatggaaccctcacggatgtgattcaggaggctctttcctccaacatcgatgaccgaaccatgcatgagctgtacctttggcccttcgccaatgctgtgcgtgcccaggctgctagcttcatgtgcgcataccagcgcttgaatggttcttatgcttgcgagaactccaaggcactcaacggcctgctcaaagaagaactgggtttccagggatacgtcatgtccgactggggtggcactcactctggtgtctcctcgatcgagggtggccttgacatgaacatgcccggtggtctcggtgcctatggtaagacccccggagttggttctttcttcggcaagaatgtgacatatgccgtcaacaacggaaccgttgatgagtcccgtgtcgacgatatgatcatccgcattatgacaccctactactggcttggccaggacgaggactacccagaggtggacccctcatctgccgacctgaacaccttctctccccgttcaacttggatccgcgagtttaatctcaccggcgagcgaagccgcgacgtccgcggagatcacgccgagctgatccgcaagcttgcagctgaagctaccgtgttactgaagaacgaaaagcaggccttgcccttgaaggctcctaagaacatcgctatcttcggcaatgatgccggggagaacacaatgggagctgtgaatgaggcgacattcgaattcggcaacctcgctgctggcggaggctcgggtaccggtcgctttacgtatcttgtctccccactcgaggctatcaagacccgcgctaaggaggacgacgctcttgttcaatacttcttgaacaacacccagattgcgactaacaatgtcaccgatctttgggtccccgctacccccgatgcctgtctggtcttcctgaagacctgggccgaggaaggtgctgaccgtgagcaccttacagtggactacaacggcaacgaggttgtcgagtctgtcgccaagtcttgcaataacacaatcgtcatcacccattcctccggcatcaacgtcctcccttgggccaaccaccctaacgtcactgccattctcgccgcccactaccccggccaggaagccggcaactccattgtcgatgtcctctatggtgatgttaaccccgccggacacctcccctacacaatcgcgaagaacgccaccgactacaacgcccctcccaccaccgaattgtccaccgatggcacgcacgactggcaatcctggttcgacgagaagctcgagatcgactaccgctacttcgacgctaagaacatctccgtgcagtacgaatttggcttcggtctctcgtacacaaccttcagcatctccgacatcaacgccgaacaggtggccgagtctatcccctctatccccgaagaccagcccattcagcccggtggaaaccccgctctgtgggagactatctacaacgtgaccgtcgcagttaccaattctggcgacgtcaagggtgctaccgttccccagttgtacgttaccttcccagacagcacccctgagggcacaccgcccaagcagctgcgcggtttcgagaaggtctctttggctccgggtgagtcccgcactgttggatttgagttgatgcgcagagacctgagttactgggatattgtttctcagaagtggctcgtccctgagggcgagtttgtccttagtgttggattcagtagtcgtgacctgaaggaggtcgctaagattactcctgtttctgtttgaaccctgtatatagagtccgtcatcagtgaccagatagcctggtagtacatacgagatttttattttttttccccagtgtttctaccagttttttttacgttctttgtgccctcttcaaacgtttcttagaaatttgctcaattatcctccagtatcaataggaaagaagaagtttctgtagttttcagacgtgatatattctttaatcaagctcgaaatgagtcggattgtctctacagctgtgacttttcattcggtgccacattcagccgttgaagacgatctgacaacacagagcccttcaccgggaactgaaagtcttgcgctgcggtttacaatcagcacaactcagaatcggagaaccgaggtcacttacgatttgccaattttagcttcgacatctcacgaggaccagcttcgccctcttcgaggccattgcattgtttcccttcctcgacagttcgccatttccaaataggcgtaaaccgatcggggactcgttcaagctggttcttgacatactgcgagacggagtcagatattctctctgcgtatgaagacggcgaaacttactttaccaagaactggaaggaatttgaatccatgacccctataacattagattagaggatatacttatatatcaagacccaagtacccacgagccacctgtgcagatgaatagggagtcagagtagccaggcacataatcgattaagaactactggaaattagtattgttgatacgatgcatttttgggctcatgacactcacctcgttatcaatgctgtcagtgtaccaacacaactttgatatatgttagtgacgggcttttgagaacctgggaactgacaaacccggctatcggtgaagccaatctcagccaactctggaaacagtccaccgatgacttgcttcatgagccctaggccatataggggcacggtattgattggctcagggctgtatttcgttcggggtgttgagattcgactttaaccaaaatggtggtaagcacatgatcttcgacggaaaattatagcatcgggtcaatcgtacatgttcccttctgtggggtgatcttggaaatttgtgaacttgaggcagacaaagtcagcgcacgttgcaaagacaaaagcgacaagagtcgggggataccttccgcgcgcggaatccgaacttcaatctcccttctcgagtgatagggaagccgcccccttcataaccactattatgccggttaactattttgagtccaacctgggtgagaaatgagctcttacccttctccttcgccttgaataaaccgccagacgggaatattgtctggatgaaacttatctcgcaggtctttccgatcttctggcacatcgatgaacataacagttcccattgttgcctcaaccgagcgatgtgcctctggaagaacagctgctgtccaaggaccacctaagttcacatgttagtacggccattggattaccatgggttgttgatcactcacatgcaacaactacgaggtctgcagcgtgtgctaatccatcgcaggttctgatgcctttgattctcttgtctgaaccatttccctcagtgatcaaatggtcaagttcaccatgaggacggcccaggacaaacttcacaccggccttttgacataaataccgcgcatacacgcatgcctacaaggaataaattaacgcttttgcagggggaggtaaagagatatttctcactttgtcagccaaggtgattccggagcccgcatcgagaaatccattagtgacaccatctttgaacttgtcaaacagatggaacttcttggcccattcgggaccgtgtgctccagctcgcttttcatcatcggtgttattctatgtctgtcattaacaatgccatccaactaggaaatcctgccgcaccttaatgaactgcagattgcggaaactaggcgccgtgtcctccatcacgcgcagattctccacatagcgcgggatcatggttggcccatcggcgagatgatacacaccgcatagtgtgagcaattcatcttctggagtcaacggtcgcggaagatcggatggatgactttctttgatagcccggttccactccagccaaatatctctggcttccagagcaagatcttgcgaactaaaggtctgttaatgacgcagccggtttaaatttcgattcggtgtactgactgttcttgtgaaccgtatgttgcacggaagatcttgttgatatcagcggatgcaccatcgcagccgtccgcagggttgtagtagttcgtgtcgaagttgcagcggtcgaagattgtgacatctgtgtagccaccacgggcgagccagagagcagtgcttaatccgaaaacaccaccgcctacgatgatgacacgagattcgggcgtagtcatgtcggacggttccaaggagcttgtcttttcagttcgagattcactcaatttattgcaggatacaaaatgaggtggcatcagtggtgttttatttgctctttaaacttgacgatatgcaacggaattgccgacgaaggagctatctatgcatgagcggcattcccgtcacgcactaaaagttcattcacccaggtgtttggattacgttctttccaggtaagatacttgacataatcaaataccttccaagatagtatgttttagggtggaacgtggccattatgcggcatttccgttcggagcaaagcgtggagatcccttgatatacggtattcatcccccgctgcttgctttgtctcgcaaataaatgataagctggctcggccaatcgcaccaaatgcacctttatctctgttcttttttatctgacttcatatatgcgcggatttaccgcaatgttggttgacaggtttgattccccgcattttcgcaagtgtagacgtcgggattgcagtaaagttatataagacaggccttgtttgaccattcgaattgccagccatggaaaatctcagtccattttgattcttctttccaattatccgatatctcttccacacacaagcacaatcaatccatgttcacgcattgagcatccaacatgggcttcacgaacatgctcggaagaaccatgctggcggactataacaggagaataaaaaatgcaccccgcgaagtgatcctgagtcctagtctgcttctgtcgtgtgcgatgtacgcgaccgcagccatccctttgagtgagtcaacttcatcgctcgaatttatgttttagccttactgaccatcgtacgcagcatgggatcaaggatcagcatccacattgccgtccctagagggctttcaacagcagttcggtatcagctctacagcgggtgcccactcgaccaggaactttgtctcccttgtctacatcggtgacgcagccggtgctgctctatcattcttcataaacgacacaattgggcgtctctggtctttccggttatacaccgcaatttggattattggccagctagtcgcgactttcagccctggaccatcggcattgtacgtatcgcggataatttctggactgggcattggatcactcagtgtcacgggctctgtctctattgttgaattggctccacctgagatacgcggactcttggcagcatggtacaccgtttgtatgacattgtcccttatgctcgctacattttgtgtgtatggtgtgcagctgcacattgcagcgagtcgacttcaataccaggtcgtgatgttctctccctgtgtgtttatgttactgtggatactggcaagtttctctctctgcgagtcacctcgttggctagttctctccaaccgaagcgaagaagccgcgaatactcttgtccggttacggcgcttaccgctcgatcatgatcgggtccaggaagaactccgaagcattaaagaatctatccaattggagactgcagctcatgaccccaatgataaatcgccctctaacatcatcagccttgcaaaggaaacattcacagtcccttcaaatctccgccgagttcagcaagctcttatcctatatgcgtttccccaattctcaggtggcaactctatcaccaactattttatccctatcttgaaaattatcgggctgaccggcgattcctctcgaaatttgttcctgaatggaatgtacaccatgacgaaattcttcttcggcctggccgcatcgtttttcttcatcgatgctttaggtcgtcgaaatacgcttttcttcggcattacccttcaactgatttctgacatctatcttgcggcatatattaaagttcaaaacgatgcatccccctctgaagctgcaggcgaggcggcgctagcatcaattttcatccactcttttggatatactatcggtgaggttaaaaaacaggttcaaatgcgcactggaatctaacttgaaggacaaaacacaggccttctaaccctcccatacgtctttggcggcgaactatggcccaatcgcattcgatcctttggtgctgcaataacacagacctttcattggctattccactactccatgacattcgcattaccgtcccttctttcccggacgaataactggggcgcctttatattctttgcggcttggtgcgccgcagctcttctatacgtatatctgcttgtgccggagattgcaggtctcagtgtcgaagagattgaacgtgttttcagcggaccgtggcgactcttcggtaggcaatctacgttccgagatacatcctctgttattgagggccaggatgtgaaccataagtcgtaagatcttctccgagtttaccgatcggccaatggctaacttgcaatagagagcacagcaaagacgaagcggttccagtgactaaatccgcgcagaagtctgttgaggggtcgcgttcgtcgtctcactaggtattttgttagtataattctatttcacattactttggtcagtcttcactcgggagcattatacgtatttcccgtctttttacttgatattggggtaatgcagtatcaaaacagtacgtggtagctttgtccatccacagacgttaatgcgttcccgcattgtgattggctgtagacatgaattcgacggaattaccgtggaaagccgacaaaagcggggaagcggcaattccgctctttccaaacttggaaggttgacttcattcagcatccagttgatcggagagccgttaaggctggggattgttatcagcagccaataaggctcgtggctttatatacatgtatgtagcaagggtcaaatgtaggttatgaatagctgtcacgcgacatctaaatgaacttgacgtcgagtacaccgtagggcaagtgatcaagaccgaaccactcaaaccagaaatatatcatagacagtgtcgaatacccctagcttcggccctttatctcaaaaggattttgtggagacgtttcccctctctcatatctctcatatctcttcgggctaccagtcgggccaaatccccagcgaacactagtctacgtttatcttccctcgttctcatattcgatccccaaccccacttgagctacgcttttatttcctttctgtgcgggtacacctcaccgcttaaattctcgactcttcaaatccctcaacaaaatgcaagaatccgaagccctcgagcagcatatccaatcccggaagtgtagcccacaaaagcaaaaacaatctcggcagatcaatggtagtatccaccggagaagcactaatgcgtgtgagtatccactgtacgccaagatctggggtactccgactgagtgtccaattttaggtcgctactgcaaacgaaggaagataaaatgccattacaacatcgagaacatgaacgggtaacttgatcgccactataataagctcgtgggggcttgactgacctgttggtagtaaatgcgtcgcttgttccaagtcaggtgcaggtaaaatacactccctttactcgtcttgaagcacaactgacctatattctagaatgtcacttcgatgttcccccagacggtgtattgagacgcgatgcgtaagcttttctgctactcacatcgttctaccgctaaagtttgcatagatatgtcgcaacgcttgaatcacgaatcaaaaatcttgaaaggcaactacaagcaagccgattccagcaacccacatcgaccactggcctttgtcttactcccgagacgactattcctgaacctcgaactcatggaagtgatgcctccacttcaatgtcgcaggatcgacgaggagttcttcaaaatgacgagctttcggcgaatgggagcgtttcacaatacaatgtaatcttattttgtcatcaacaaattatttgaattcggaacactactgatagtcacatcaggtgttaccagatatggcacaagatcaatctttgaaatctcaggaacaagtgcccgggtctctatttgggaccagaaatgatacgcaggtgtcagatccagacgtcaccatcctcgagatggtctatggacgtacatttgtcccggagacagaaattgagtctctccctatgttaccctcgagcaacggtgccaagaaacttgttgatgccgcgtacttttatacccaagctcgatactgcatcgttgactggaatcagattagtgtatggcatcaacaaagagacacaatcacatatgtttcttctcaagattcgatagaatcccaaactggtaaacatcagccatgtgattgagtttaagcacaatgactgatatcacagtaggggcctttttcatctggataatatatgccattggagcccggttgatcccggaccccgagaattcaacagaggtatgtggctgttgaccggacgagaaaaaaaagccttaactaagtgtgataggcattttttgctcgcgcgcgaacttatctcccagcaataatgtccttacaggacatggcgacggtgcaagctctgctctgtcttgtgcagtattacttcagagcccagaccgaatctccaatatggttcgttggacgctatttttcaagaacataatttgctgatgttatgactaggcaccttgtaggccttgtcttgcgcttgtgtgtcaagctcagataccatcgtaaacttgtggcatctcctgaggctcaaagtttagatccatataccgttgagcttcgaaagcgattcttctggtgtgcatactgttttgatcggtgtgtatcaggtctactccaaatgtaaccttacacgatgaaccaacctaacgatcgaaatagatcgctggcgatttggtccaagctcccgttcggaatcagtgattctgatattgatgcagaggtgtgtgctccggcttgaaaaatgtcgctctttttgaccataatttagataccaattgatattgacgacacgtgcatcgaccagcacagaattcgacaaatgcaactccaaggaactggagcccaaggtaaagaagaggggatgatcactacggtatgattaatttgtttctactcgctcaatttcgaggtcctaacacttggaacagatgaccgctgctttacaccatttgcatgtgtaccgcatcagatccaaaatattgtaagagatcctctaccacatatatggaaaatgttaaccctctttagaacgagatttactggaccacatgctcaagtcccatcgctagccgaggtccaaagtcttcttcatgaactggatcaatggaaacagcaagcgcctcaaaaacgagactcgaggcccttccctcagcaaacccctgatcgagtacaggctacgtacacacaagctgttctcctcttaatacgacccatattaatggccaatgtaattgaccccgatttaataggcctgtgtgttgaattcgcagttgaagcatgtcaggtaagtgatctacatcttagcaccgatgaagctatcttctaacaattcaacagaacgcaaaatccttgagcttaaacccccaaacacctccggatcgcattacagtgtaccactgcttttattgtggtgttaccttactacagtgcttagcgataacaccaacggcgttaacagctcggcgcactcaccaggcgataggcgcttgtttaagcgcattggctgtatatactcgagtactgccagctactgcaccctttttgcggttgttcgaggatctctcgaatatcctgctctatgacgacaacggggctgatattcatccaagccccgaagtgcgaaatgcattgaacaggattgtttccagtgatccgtcagaagcatcagggtaggcggagtgagatcttttgttgtaggtttctaactttggacctgtaggatcttgcattcactatcaagccagaaaggccaagaagcgacatctaggtcgacaccggaaactcttgaaatgggaacgatggtacgtaaataaatattctggtttccagtcgtatatcacttaacaacttttacctaggcaactcagtatgactctattctgggtggacagtcctccgtgatattagacaccgactttctacttgagatgcctctggatatatctccactttatgcgcccgatatcgaagtaccggaactgtggactgagccgtggcttcggctttcatccacagaatatagtcaatagaagtcctccaaacccctgaaagtgtgaacagaccacgaaggattttcgtggattgggcttatcaacttgcccaggtgggctccattcatgaatatatgtactacacgtatacggccttctacgagtttgcgaatacaaaatgtagagtttacatccttcgcggtatacgtgaagcctcaatataaatcatttgatatatagcttacagctcttgttccagaagagatactacaccctacactgtgacatggtcatttaacttgaaggttgttttcctcagttgagccaaaagatactaatttctcttactgatggccacgctaggggtgataatcacgtcatctctccgcaactactatcaatgctgtgaagcatgaaaagagccctgggagacgtacaagtatgctatcaatgacactatgaacaaaagaaaagggagcaaagacgatatctactccgcagatatggacaaacgatgtcacgtgcgtacattcttcgtgtcacatcccctcatcccacgtctgctcaactttcaatatacctacctaggtagacatctacactggagaccacagacccaacaaagaacagcccaattaattcctcaccatggacgccaagctagtcctttacgacattgccatgggccccccagccgaaaagtacaatagcgccgtaaacccttggaaaacccgtctagccctgaacttcaaatcactcccctactcaaccaattgggtccaactgcccgatgtatccagtgttcgaaaaagcctcaacatccccgcgtgccgcaaatttgccgatggcacagacttccacactctccccatcctagtggaccccacaacatcccgcaaactcggcgactccttcgacatagctgtctacctgcaaaagcaatacccagccgggaacgatttattcccgccccagtccctggactacgtctttagtccggatgctgcaatcttaattccattgtctgagtgcgatgggagtgaatacccccaatatgcgcgtttcaatgtgaatatcgatgcagctttcaccacgcatgtcggactcatggcctacgggctaccgtttgatcctgcgactgccgaacaggcaaaagctgaatttgttcgacgggctggtgtgagctgttgggaggatttggctgtaacaggggaacagcgtgagaagcttctccggtccttccgggagatgttgggtgggctggcgaagctttttggtgggaacgggccgtttttacttgggaatcgggctaattacgcggatcttattgttggggcttggttgaggatggcgagcaagactttgcctgctgaggagtgggggttggttcgagattggcatggtggtattttcggaaggctgcatgatgcgttggagatttatgcggctgttcattagggattttgctcttggtcccaccaccaaacattattcgactggcagccaaaaacaaaagcaaaaataaaaacatgcagagagattcactggtcacctattttatgaattgactgccttgtcaaacttggttagctctagttgtccttggcatcaagcgcttttgttatgtcggagcttggaaatttccctcatctattctaccttcgccaaaccaccaagtctaatctcagatacgtaatttgttaaagaccttcctctcagtcatttacaaacatggaccacctccgagatagactttacagtcacccggtctgggggcacgtcgtccgtcgcactacctactctgctgaatccgatgctgtattcccaggcactgttaggtatattgatggccgcatccggcaatcattttccaagacgccaaccagaatcctaaactcaatgattccaatgaaatgtgggccaaatatcgtcaactatcatagaagatccaacgcgactcaggagagcggccctcgaggtaattcgcgctcatttcgaagcctgggtggatgaagaatccctacagacgctgaaaaggatatcggcggagtaccttgcaaatcaggggccagggtattcgtgtctattgtaaaagtggtttattcgcggaatatttcactgtacccaatagtccatatgtgtattagagtataaatagtgctttattaacaagacaaatatcaattccaactccttcccatctataccaacgcccaaattttactgaattattaagtcgaaacgcacgtggtgattgatctagggccgattgagctgttcacggcgataaaagagaaggaagccaaagctacaatcacagttagtacatggccataagatgagagaggatgggatgataactgacctagcgagaagctggaagaaaagggcgatccagaaccacgcattggcaactgcgtccagcgacgatccaacagcaggggagatatctcctggaccgaccttgtttggtgcaaatccgcgagcacaaattgtggcgatagacccaatagactgtgcagccaacaggacgaaaacaacgtgtactcttgtcaaggtctgtaggagaatcattcccaaaccgacctgttgaatctcgtcaagaacgccgagccagagccagagacaccgggatgcgatagctccggaagtcatacctccagcccatggaagatagtagccgatattggatgttccccaccaagtttgcgcccatcgtggtgcaccgatactcaggccgaagaccggtaagatccaactgtgctccttggacaagaagcggaagagtagcatcacggcaacccagaggacaataaagaagaagatgaccaggagagcaacttcccatggtttggtgtgttgggaggaccagaggaatgaccagtttcggccgaatgccgcggaaaggaaccagttctggacgatgaccatgaagaagaaccagaggacgattcggcgacggaatagagaagtgtagaagaagaggatctttccgggcgcttggcgataatactttggcaagccgagagcgaggagaacaccgataaccaagcaaactgcggcaatgggcatcaccacagctgtcagtctccaggaattcaatgcaactgtggaaacacctccaacttccgcggctgtgaccctggaactccagtaccacagggcaacagtgtagagctgtgagataccctggataagacttgcgcggaacatccagtctttcacagggacggcaccctggtcaccaaagttgagagcaaagaacaaagaaccactggaagatgctgcagcatagatacctgcggcgacattctgagcccacgcttgaccgagttctgagagtgcgaacggagaaacgccgatggtgatgaatgccatggaatatatgaaccaggggagcgtgaggactatgacagaggggaagcggtagaagaggaaccaccaggcgatggaagagacgcagtagattgccgcgataacgtagagcttgactgccgtctcaccaatctggccagccaaaagtgtgatctgcgcagagttggttgcgatgatttgtccgagacccaagaatagagcataaacaggccagtttccgacgcgccatctcataaagcgctggacggcaatgggtctcttgtatcccagacgagcgagccacaaatcgatttcatcattgttgttcgaatccgagtcttcgggaccttctgtgacgaggttgtatggtgtgttctcgacagcattgtccaagccagctccagtcgcgggacgttctttgggctgcttcttcaactgcgcatcgttgtacatgtagaagaacttccgctcggacttcatgagataaagctcaatacaataatctgaaattgagtttttcttgttgaggttggtgagcagctgttcgaagtgccgggtgaagtggcccatgctgtctgtaaaggtcgggtcgaccttttgaagatggaaatctggttggtcatggtcattaacaacagaaggcaatgagaggacagagatattccgggaatgagcgaagggtgcagctggatcagaaagagcaccaggtgccctcaccggggaggagtcccttgagatgaaacgcgatgactccgacgccgacgagctagacacaccacgggagtggttgctgtttctagggtgcgaggcaagatcctggagagggaaattgaccgctgccatagcttcttcttgggtaataaggttctcctgcggtgtggcagtgccctcatcatcggcatcagtggtatcgccgtcgacgggctcgagcatctgactttcgcgcagtgacttcttgacgagacgctttctgccatgccctggcccagctcgtcgaccgagcgacaggttgcgacctaacgtgctacctctgttgttttcggctacctgcatttcctgggcttcgactgcctgtagctgtagaagggatggctggaagggctgcgatgttcttcctggtgtatccaaagcccccgtcgctgacgaagggcgggaagtcattgcggagtcccgcaaaccaggtgtttcccagtagatctgagactctcgtgctgagcctgcaacggtgagttgattcttctggtgatgaatgtggatagatgtccgctgcaaaacttcgagcttctgaacccactcgagaacggggaatcgttgcttggctgagtttgcacgcatctcctctcgggtctctggcgtcgattccaaagcagactttatggcggttctcaactggtgtaagagatggcgggctgagtctgattccacagtgtaccaccaaccaggcatctggccgagaccaccgatgcgggagccgattccaagtgcacccttccgaccgaactcaacggcaatcaatccgaagggttcgtcgcgggatgggatcagggcgaagtcggcaccagagaacacgaaggggggaaggactgtaaactctggcttagagaagacacgtcctgggaacatttccatgatgcgctgcagtttgatagcagccagcctaccgtacagatcgataataggaccaatacagattagctgcacattaggtctagcagacaagacagccggcataacgtccgcaatcaagtcgactcccttctgcttcgaccatcttcccacgaacaccagtaagtcagcgttggggtcctcgttcaaaccagcccatttctgcgcttggattttgtcattggccagctcgtcggtagactgaatcgaaacttgcacgtcggggtctttcttcaaggcgcctgtatcggagggatcgggattggggagactgccaatcttgccaagactccaaaagattggataacgggcccatgagcgctttccatatttctcggacacaccaaccgcaccgaagccgcgttgatggaatcgcaaataactagctccggtatgaaggaggttgaaaacgttgccgaactgacaatatttggtcgctatgtcaaccggaagattgaagacagaacagacttctttcttctcctgtgaggtcctcaaagcccaaagaccttggaactcggcattgtgcaatgacagacaaaccgggatagttcgcgatgggagtaggtaaagtggtgccacgcagccatggaaatcgttgatatgatagaggtcgatagagggggtccgcttcattacctcggcgatacactgattccaggccgaatagtaaatcgcactgtcaagatcatccatacgtggaggataaggctccgccttagtctgctgccggaaaacaggagcatcaaggaggacgtaggtgatgttatccacaacgtgatactggacttgcactgaatatggatgatccaagatcgtcaccacgaaaggttcagcaggcgtatcctcagggtaatcgatatcaccgacacacggcaccacccagatgagattctggtgcttcagattctgtgacatgagctgggccattactcccagaccgccgatcttgaccttcaccttccagtcttgaatgtcgtactccatagtggcaatcaatacagtgcgtcgctggtcgctcgctcctgccagagccatgttcgtaggtaccgacttttctgccatatcgatctcctcgacatcatctttggcgaaagttcctttgagtctacgccaaagtagtaccgaggagttgtcggccttggtgacattgccattcttgttgagtttgacacggtagaagttcgagatgaagatgaagacaccagcacaacccataaggatcggaataacccatagaagaatgaagaggaccaactgggcccatccagacccgacgggaatcatttggtatctcagattagcatcgttgagggagatggtccagccaagatgtgggaacggcggtggactcgtgatgttgatcacgttcgatgagagataggacggaggaagcttttgaaccgaagacgagttgccgacatcaccgtagacctcggtagtatcaggggcaccctcactgtccgctccccaaacatttaactggcccacggctggccattcgtaaacgaagtcgtagttccagcgagacgttttggaatcaaatctcatcttgctgtctattcccgaatcgtagccgtattgattgtacgggccgttaaaccacaggtgcgggaatcttcgaactgtatcgctcgcataatcgccttcctgaatgtaatcactgcttccagtgagccttgaaaagtactggacccggatatgagtcccctcccactttcgggagtccgggccagcgaaaggcgggatggtaacagtcgtgttgccacctaaataggtcgtccagttgttccagctccggccaaagtcagacgagtatcggaacatgtccgcaccggcagctctgtgctgaatgtaaaagtcgtcgttggacttgtggactagggtggtagagtaattggcaagtggagaaatcagggggttatcatgagcaccgaggcggagcaagaacttgtcagtcgaattggtgtaaaccccagaagaggaaacatttttgaccgtcagttggtggattccatggtggacatttttcaggcttgcagaccatgtccaaacagtcgggacttctccaatgtagttatgtcgcgaggttctgggagggactttggtgcagttgacactagatgtatcaagctcggcagtgatgtttttctcagttttagaattcaaggacactgcctttgtgatgctgtcacagtccatttcggtggaatatccaagctgaacggacacggtttcaccgctgtcgtctgtatatatcaaccgagcatcatgcccagggaagaaatccgtgacggtagggccgggctcaacgaagtgggtggtcttgacataggcacggtattcccatggaagcaactccattttacggacgcatccgtaggaattctcggagttggctgggccatcttctaaagtgagttcatcgtaaggatagaagaggttcctcagttttgtccctgagtcaaatggagccaataaggacgaattcttatcgctgcagttgcccccgtatgtctcagtttcgtttccattttgatacacaagccacagagtttcattagcccggatctcgtttgtctgtactccagggaaatagctccgcaagacagaccaaaggccagtgaccgtgggggtggtatcagagccaggaaggtagaggtcttttgtgagttgagagatcgtttcgaggaacagaccatcctgggccactgggtagtgggctcgaatctcgaacatacgcttcatgatgttgcgcagtggatgggcaggattccgctgatcgtacgtgacagtgatatcattgcaaccctcgcgtcccttctcgatagggaaatcatagaactttgaggtgttcaagttgaagcagccctgtgtccaccatgcggtctggtaggtcatgggctgccggccgaacatatagttggatgcagtagcgtcgaacacgtacatgtcctgctcttctccccataagacaagagggattccaggaagctccagcgagatgatatataaacctaggaggtatttatctgtgccattctggaccgctggccagcggaagttatcctggttcgatacaccatacatatgcctggggtccacttctcctgtgaaggcattgaggaaatcgttggttatcaacatctgattccaggcttcgataaagtcggtaggcaagtcaaagccggcaaccaagttaccgtccatgcctaagaagcgggtcatcgaacggtagatggtataatgaaatgcggaggcatctagagcttgaaggccgtcgtctcttaggaaagctgactccgagttgttcgtaagcttgatgcccgcgcccgcattggccgcacgctgatccggctggcggccgcggccgaggtagagagcgccgaaggtgtcaccggaggtgatctcgccggggaggaagaaattttccttgccaagtttctttgcgcattcacggtagctggcaatcatttcgcttaagggctcgagggtcgcttgcacagacttatcaaaccggaaaccgtcgatatccagactcgcgatttgaaggcaggaatgttgaataagcacatcgcggaccggcttgtgccattcacggaggcgatcctgcacggaggcaaacttcgtaagttggcgttgccagtcggggaagttgccgaacgcctctagctctccatattgatcgaaatcgctgttatagcaacccctcaaatcttcaaccccctcgttcgttaatgggtatccggtctcatcccagaacttgggatagttacaagtctcgttatactcgttaccgaatttgaaatccacatattctctgtcggtaacccattggacttcatattctgaagctttgaagtcggcagaactgttcagatggcctttgaatccgatcaggttgctcattctgtgctttaagatcagctcatgaatatccgaggatctagggcatcgacttacgttgatattgtgttatccatcaacacatacatgtcccgtttgtgaatctcatcgatcgtccgcctccagtcctccagtgttccataatgcatgtcgaggagagtggtatcgaccggcgagtacccatcgtaggcccagggcaagttcatcaagtacgttccggcgaagtagatgacctttttgaggttagcggtagactcattacgaagctgggtcaactaaccttgaatcccattccctgaatatagtccagcgtatctaccaggccgtccaagtcaccgccgtggcgcatctgattagaattgatcacatgctcaaatgcggtgccattgatatcatcatttgtggggtcgccgttggcgatacgatccaaaaagatggtatatgtagggaggcgccagttatccggtgacggatgatagtcatggtccggccatgatccccaataatcgattgggccttcagcggatttgttctcatttagattgtatttagcgagtgattcatcgtaaggccaagaaaagccaaaaacgctcaaaaacgacagtatgaggaaagctgagcgctgcatttccgtagatgatgctgttatcagcaggaacctgctgccggaaaaatgcgcgactcaaagaacgaatgaaatgagtctttgacagatagcgagagtgagatgaaagaacaaagggaaaaaaattcaactgaaacaggcctttcgcattttacttgattactgattttctaagattttccagaatacatttttatggagaacaaatccttatcgggccgaatggatggtctatacataggctgacccacgtagcccacccagccagattttatctatccactgctttttgccgctgcatgctttttgggcccgtgtctcaggttcttccgaaggggttgaatcattcactacagagtaattgttaacaagctgccatgggttgtcgtgatcctagtgcatccacctaagcacttgaacttggcttccgttgcacggcatattccagttggaaaattcccgggcttactaaatgggcattttaccaaggtacatacctaggtaggtacataggtaggtacacaggtgcggagtatgcaaagtgcagtccttagcgatacgctgcatcgtcaaatcacagcggtgtggctggcacatatgtacgctgtatggcggcacgcatttgcgatgagatatgtcctaggtcaaagcaccatatttctcttattttcactttccaactgcatcatgcaatgcaaccgataatcctcgaggcttatgttctttattattcgagaagttgtactcctaggtaaccagttgttctactctgcactcaaaaacgtgtaaacgatatgggagagtagatattaaggaggccattagttggaacaactatctctactatttctataaaaaatacaaataaaatgaaaggtacacaataaacctgaactagacatcctattttacgatattttctacgatttcggtcaaagttggtctgtcggtggacttttttttcgggcccacccgccttcgacgtcacatcttccgtcagtttcagaccactatacaatgtctcgaggtgaatcagggtgaaaataagaccttcaaattccctgtttgatggagtagactcctaaattaactatgccccgagcctgcttcaccggtttcttcgcttgttcctatgcatacgaatctgacctcccgtgtcttagatagaagcgagcgaatccacacatatgtacctaacgatgctgtcacccttctagttacaattggaaaagtcacctattcccagtgattatgtgccagtaatttaatggcgaggctggagaaccgtatagaataactgatgatcctggatggccatcatcatgtttttgtttttgctttttcttttttcttttttctttttttgccgcgcccaggcagtacaagcttgtcgtgcgcggcctagaagtcgcaccagatgcttggcttcaacgtcctagtcgtattctcaatcgtattcgaacggtatgcctggagcttgtttaatgttagtctatatggcgataccaaacgagcgaaagcttccacctacatctacatgatacacgataacccgatacagaataatgtaccgataaggttagcttaaatgtaccgagggaacggcctcacagtcttccaaggttactaaatatagccaagataaccaagcaatgattgggccaagcgacccacaatatttattgcttgtctcgattcgcacgccccaatcagagtggatcaaagttcgcctcactcttgtgatacactcacggcacattagaaacacgctagggcatatatgatttagcctagttccagatatcgtcatatattgtacgaagtacgcaaatgtctcatatgccgcattgaagcctataaagaggataatcagggcaagccaaccaacataattgatatatattgtatacgaggctccaccgacatcatccgattggggctagtttcactatcagtggggcaccgatttacgtcggtggatctgtgcttacagtgaagccaaccaagtgttggcactgaatagcaaattttcagatggcgaatcccaagtattaataattgcacataaaatatacagaaataccacagtcataacctgaattctcctaaccttcagattagtgtgtccccaaaatagttagggaaaaatagatatactaagacatatacatagtgtagaagaattttcaattgctaaacttcggaggttccttgaaggttccaaggtctatgccatgagtacctgggcatgtacctacatatgtatctaggtacctatgcttcaaaccatggaaagttaaagcaagagaatggttcaacttctatatacaacaatgcttacatgtggtgttgttaaggtgctctttacacttctattagcactcgaaatcccagttctatctacgtagccgctatacgatcgtactaccgaacactgctaggcggattttcatcatcattcgggttcgccacgattacttgacacttcgatctcattgctctgctccctaggcattgacctataagcagacttgggctatccaagattttctcccattgtttgccggctattttcaatcggcggttccacaacaacctgtcttagttagctagttaactacaaagatttatattgaatgccttctatctcgggtgtcgacgtcttcacaacgggaaccctaaaaaacttgttgttctaggagatcagttctccagtcgctccattctacgcacattcagagatataagggaggccatgcaatagctgattcttgcatttgtacatctcaatgcagttagcgtcaatctatttggtgagaaacggggctgtttctttcagagtcagagtgatagtgatagtgactgaatgtatataacccgatttggaggcacaaacgctcatgctgaacttgagtacagggtccattagggtagttgctgcgttaatcgaatcgatgttgcacaaagctgacctttccccactagtacaaagcggaagtatgtcatggtacgtaactactgaacttggtgatcaatattagcaagtcccggcccattacagcccaacttccattgaggctgctctttctgggccgagtcgagcgttcctgaaaggaaagactgcacgtttcacaagaacgttgggtttgacgtaacaatagttattaggtaggtccgaccacgcgaacttatacagcaaaaattattcgtaatgcatggctaatgtatgtggctttataaggttgtggttaatctattgacctgacccttataggaaaagatgggcgaggtttcacagaataatatatattttatatcattaaccttaagcaacctcgtcttctaggaaatattgcatcaccaaccttcatggtcgattctttgataaaatggagaagcattcgaggcggatgtggcgaagctaacaacaggactgcactagagtctaccacggttttttcaacatcacctaggattaacactgagattctggtggttacataatctttacttgaagtgaaggtttatattcatgtgtggcacatatttaaagtggtggagattcgtgatctagcatacaagccccgaaaatttggacgccatggcagacggctcacccgccaagttcaaaataacagagcatgtgattgatgcacaatatattcgggaatatcccactgcgacagtttctcaagatgctgctttaaaagttgtggtgaaaaagtatacacctgtggacaatccaattcctcagccaggcgacgtaaccatcatcggggcgcatggactcgggcttccaaaggcaagtaaacaatctattacttgtatcacaaattttattggctaatcagaattataggaactctacgagccgttatgggaagaaattctagtacaaagtcaacaacaagggtttcggattggatcgatatggattgcggatatagcgaatctaggtgccagcggtgttgtaaatgagagaattcttggtgatgaccgtaggtgtatgtcgttctacatttgaatctcacggttaataagtccagcgtccgtgtttgaccaccctcgtgatattctacacatgatcaatctgtttcgtcacgagatgtcgaggcctattatcggagtagggcatagtatgggtgcgacgcagctgtacgttacttgaagcgagaggacagagtaattaatgctgacatttcgcccactagagctctcttatcgctggtgcatccccgcctgttcacttccctcgtcctcatcgaaccagccattctaccaacaaacttgcccttaaagttatatgcgttcctcacacttaacagacaggacacctggccatccaaatccgaagccctcaaatcatccaccaaatcatacgcacgatgggattctcgtgtcttgaagcgatggaatgagcatggataccgcaatttacaaacggtggtttccccacaaatagatggagaagccaaacccattgacggacccgtcactttgaccagctcgatctaccaagtggctatgctctgtcttcgaccaaacttcatgggccacactacttcagcactagcagactccaccgaagcgcctccgcacgaccctcttatgtaccccgacattatcgaccctccccacctatccatgcccttttatcgaagcgaggtacgtgttttgttcctcatgctagagcatatccgaccatcagtcttctacttgtttggcggggagagccaggtaacaacaccagaggatcaagctcagattctcgagaggacaggtgcaggaattgggggaagcggcggagtgaagcattcccaagttaagaaaacagttctgttagaatgtggtcatacggttccgatggaggatgtggctgggagtgcttctcttattgggacatgggttggccagtctgtgcagaggtggaagaaagacgaactgcgagtccaccagaaatggactaatcattcaacgagggaggttctaactgcgcctgcaaaatggaggcccatgctggaggaggctctaaagtccgaagcgcggaaagaaaggtcgaagatctagtgatatccatatgcttgctttgatcttagttgctttttattgtggattcgaagactctgtacggtactatctctatctgatcttatttttcggttaactacagggctctcatatacttgactcggttttatcaatttaactagcagatatataacatgtaacctacgaagaaagcttaaccaacatgaatgagtacgatataaaggccagaccataatattatatctacattctatacactgtgccatcttctcagacattaataaaaataatgttacgattgatagagtccttaggacacagttcactctgccagtggtcggcttaatgctcgcactttgagcggaagatcaacaacacaggttgcacggaggattaaattagatagcgtgtcatgacaagctacacatgtacaacatcatgtcggagttgctatgcggttacacattactcatggcgagtatgcatccttctgcttgtggacaggatgcaaaggttacacaccatccattgcctcgacatatttacccccagaaaggtgaggcacatagccgattgtactcgacgcacgatatggcgttttgagaacccaaaacatcttgtcagcgaagattgcatcgtccaatttgtgggaagacccccattcgactatgctgtgacatatgtggcatataaacgtgttatttaccatacagcacccccctcttgaggactaatactacagttggaataatatatattcagacgcattcggcgtcttctttccttcttccagtttcccaggttcgcaccttaacatctacaataatcgacgcgaaagatggtgcctctcacatttggcatattcgagtacctgctcttgctactaggcatactatttgcgtataaaggcacgcaggttatttaccgcctatacttctctccacttgccaagtttccagggccacgcttggcagcagcaaccagtctttacgagttctatttcgacgttatcagagacggccagttcatgttcgagcttaaccgtttacatgacaaatacggccctatcctccgcatcaatcctcacgagctgcatatcaaagaccccagctattacgataccctctacggtgggccattaaataagagagacaaattgccttcgtttactcaatcgggattgcccctatcagcctttgagactgcgccacatggtcttcaccgtgagcggaggaaattactaggccctttcctctcaacacaatctgttacgaacctccagcctctcatccaggaaaaggtggatctggtttgtggccacctgtccagaagggttggcacaggggagtttctcgacttgcactctatcttagcttctttcgccgcagacgtgctgtccacgtatgtgcttggccgcgagaattgctatggatacttggacagagcagaggtaacggatgaatggaagaagattgttaacagcctctttgaggcactgcttcttatcaggagtgtcccgtcactattgggcctagcgcacatttttggcaagactatcgcctggatatttcccccctttcattggatcaataaactccagacagtatgtatgtggtctttctccttacactgcgatatactgaccatgtgttaggaagttagtcaacaagtgaaggctgtatacgacaaaccagacggggactcgatgatatcgactattctctccaacgagaaagtacctagcactgaaaaagaactcgagcgcatggcggatgaactgaagttcctgataattgccgggtcggatgcaccgtctcaagtaatggcgatcactctgttccatctcctctggaatccagaaacatgccaaaaactcaaagccgagttagatgaagctttccccgttgtggccgatgcggactggactcagtcgaagaatctcccttatctggtaaggcgtatcagccctatcgtgtccttgcagattgtactaacaataggtgcgccagtctgctgtgttgaaagagggtctacgactttccgcggttgtgacaacgagacttccgcgtagtgcaccagaggaagctttacagtacggaaaatggaccattccacccggggtatgtcttcctaatttatatttcctctatccctcccaccaatcttcttcttctgttgatatttattaatacatcgatgtagacgcctgtcggcatgtccactcattccattctacggagccccgatatctataccaacccgatgaaattcatgccagaacgctggatgggccctgccgaggaagtccgtgtactggatagatacctcgttccgtttgcgaaaggaaattcaagttgcatgggtcaaaggtaagcagtttctagtttctttaccagttccagacaatggcactgatatatattagcatgacctactcgtggatgtacgcaattataggcaccttgatacgcaggttccaattggagcttcacgaaactgatgagaagaatgttcgcattgttcgagactgcttcaatggacagactgttcgggggctcaatttgatcaatgttaaggtcgccagagaattcaactagattgttctcagtcatgcgggtaatcaacctgttcgcttcttgatttagattccaatctgtttcatgtcttgattagctttcagtttttatatcatctcggtccaaattgattgtcacatcttctcgacctaacccctaccattttacccccgcgcacctaaaattgcataatttctgtctttcccacaataagttctctcctttaattttatttacctggttatgcttattttataggggaatggatgggataaatgaacctggcacgggaaagaatgacatgcattactagacgagagaattgcttcaatttatgctatagtcgaaaagggtcccaagtaatataacaaagcctaagtcaataggaccaaaacctacctcgaagcctactactccacatttagaccctaggcccaaaaatataatcccgatcgaccgaaaggcgtccggcagcaatctccatctggtagtgctcagcaagtcctgcaacgataaccatccaacctcgcgtagcaaggtccttgtcacagttcataaccgggaacgagatacaaagtccctccttgtggtgcaaggcatcatagttggtgactgcgcagtcaccagcacggcaacggtcagccacgagatccatcaattcttcatcggaagaaaggcggtcctcagcggaaagcttcacagacacccaccacagctcgggcatgctgctaaggttctcgtagtgaggccggccgtctgagaggaagatggtacgagttcgcttcaaagcgacccgacttgctgcattcatggcttcgagggttgcggtagcttcgatctagatatgttcagctgttagggggtgttaggggttcgtttgcttttgatgaacctttggtaagaaactgcttttctgtctgatggtagaggctatatgagggattctgaggttatttaaatgcgaagcaatggaacaatgggcagttctatcgagagattgcctttgacatagttgacaacaaagcctttcacacaacccaaggaaggtcattataatgccctttatcgatcctttgactagtttcaatgacacccaatgcctacatatagtgtataatggacaaagcctcgaggccttttcactcctttcggttagggatcagagagccaaagaacaaagcctccacggttgtcgatgaacgctataccttcaaggaatttggcattgtaaatgaacgttagtctggtgtttagctcttgcaatgatatttctctaatggagtcaatcaattcaaactaaacataggtagcgtctcgagaaatgcgagcttgatccttgcggtgatatgcttttagtaggcctaaactccagatacaacatcgcggcccagccttatctgattttgctcgggtagaagtctccagcatgcagacatgcgtgagacacgacaaaattaggtattttatgcgtagatgagaaggagtaagatacggcaatcgaggttttgtgcaagaagaatcgtcaatttcacatcgtgttcctcgttcctaaggaagaaagagagaacaaatcccaaagttgcagccataacgacaaaataatcagggagacaaaagagttcattaatcgtgtacttggataccggcgtaagggttgatccatcaaagaaatcccgatgcgtcattttaatgcatgttagataagccgaggcctctgaggtcccgaggtccaaagctttcaataccgcccattactcaacatagttggcagggaaaggccccttctgccctctcaactcaccttcccaccaatcgtctgtgctattcgttttttgcacgacgcgaatgcggtccccttctcggaaactcaggtcaccgtttccttgaccatcaaaatcgtacagcgccgtgacaaacactggacgggaagctgccggcggtggtggtgggggctttttcttccctatggcggcagtcaagggcgataccttggcttggaaagagtctatgtttggaccggcgggtgatctcaccactcctgatgaaatgggagtggcttgtggagtcggcatgaatgccggacgaggggggtcgaagtagtcgccgcccgtcgagaggggctgagatcctgcggcgtttccaacaggaattgcgctgctcttgcgattaattgttgacaggggtggagatggagggtattctgatacgcagggtgtctggctcgacgatcctggagtttgcgatccccggcggaaagaacctgggagtgagaccgacgaggcagtgctgggaacgcggctcccatttgatggacgtttcttgttatcttggtcggtggcggctcgacgcatggccttgccttgggtcagggaaccgaagctttctatttcggcttgcacgggtttgaaggcaaactcccagtcttggacaacttgttccatggctggtggcggggagggaaatccttcttcttcacaataagtatgaagcactgtataatagtgcgcaagcatgcggttttggatctcgacctgtgcttcgagaatgtatggtgtcagggagaatatgagagcgaccaatgttgggagtcgctgtcgtagatcatgatcagcagcttggtaggcctggatggcgattagttttcttgaaatcatatgagtaacgttgggcgttgggatttgtacctctttcgtattggcaagttctgcctccgctttggctaggctcacattttcgcgatcactgcgctttggctttttcatgaggctatcaacacgcccttgggagatttcaaagtcggtctaggaattggaatattagcgacaaccaatccaccaaagactctcatttttcattgtgtaccttcttgtcatttcgctttttgatcgtctttttcatcggcgcaagtgattccttggcccgcgcagccggctgggacatgcgagtatcgacggcaccgagttcctccaagagatcggtacgtagctcatcgtattccttccgcagtcggtttgtccgcgctaatctgacggggtctgtatccacggctttgtggttggagggggtttctgaggagccaatgataggaccgtagaggccgtcgaactcctcgacaaggcgactctggtaagttgcgatagagatccaagcatcacgccaggcttgggtggattccacgatctgatcaaataacacgtattaggaaatgcgacaggacgcgcgtcatcggggtaagattaccttgcccaagagcatatctgcatcgtcgaaatcttttagaagcacagcaatttggctatcatctgcagacgacttcgtcgtcatgcgaccaaagcgcctcgacatgttctgcatattgggcgatggggagctctcagaagggaaacacgaaacagggagagaggggtgataatagaggtatcgcacacggcagagtacttgaaacaaccttggaataacactttaattcgaatattaatcaattccagattcaaaatgtgaattgattgggaaggagcattgaaagaaaccttccaaggttggaaggaaaacgtcccatcccctcatgacacataactcgcccgcgggcggccccagtgtttcagcctttcatgcggctctcgcgtcacggcccctccataggtattgacgtttcgggaaggagatatgtcaatcagctttaaccccttctccactctagatatgtacatcatattgaacaaaccagaggtaatattagtagtagtcttatcccatgcatcaatacggtatacctatagcaagggtatacatatcaagtgtagctttcatagaattgcaatgaaagaaaagctaaaataggtaatatgtaaacattgaaattgataatgaaattcacggtatccatggaccaacgaacttaacctgctcatgtacggactctatttgactagggacctcgatctgaatcctcgccgtgcaattcttgctcgcaaaggttctattacttgtagatatttgttttgcgtttcccttcgatcataaccctccagccatccccaggtaaagaataagctttatacaacatatcatccatgcaggaggaccccctattcgaaatactaaacaataccgtagtcctatagtatttctaccgtatttcaaaattatactgtaacactaccatagtttagatgaataccgtagtttaactgtgagatcaccgtattgaatttaatactatattccgatttaaatacctttaatactagagttctatagtaaatatacagtgactggtcttgaatttttaacacgttagccccacctgggcacaaccccttaattatataatatactgccaatctacctaggtaaaacctccataaattcataccatgaaatctagtatagtgtatacataccacccctggctctcaatgatagcttccacccggtgcgacatcgtctcaaagagatgctctagatgccatagctccaattcatcccatgccaattacgatatcgctaccaatatctccttcgtcgtgtcattgttatccatattttagcgtggttttcatctacgcgttttgagcaggcggtatattcatataccggcggtgaactaggtggggctacaggtgtgttaaaaacatatgactactgaccttagttacctacgtaatatagacatacgccttagaatacggggtaatcacgtgatattacgtgatccgcttagctaaccttggaaaagcaaccttggaaccttccaaggttggaacctttactcgttacagataaatacgtattcagaaacaggggtagtattcactatatatttagccaatctttagtattacatagtatttaaaagcatttcttcgcaaaagtagtattctatagtattagcaggcaaatacagtatttaagtaaataccgtattcgataaacttcggttattagtgtaaagtttttgaaataccatatttattcaactaccgtagtactaccgtagttctaccgtattttaaacccctctgtctcctggatggtacctatttgttgtctgtcccggttcaagtcagaacgggtagccttatcattaagccgcacaacacgagaacaacatgactacatctacatttcccgactccatgcgatgcagccacgatcaacttaggtgtcccacaatcctacaatgatgtccacgccgtcatcttccgcgcgtcttcccccaatcttcccgcaggtcattgcgtcagtggtgaagtttcgctgcctatacactcatgacctacgccgcaagtccaaacgatggcacgatggttatctacgttttcataaattcaataaacgtgtcatggtctacgatgaccaagggaattttatcggcgaccaccactggcgatctcccgatgatgtacaagatggcgacgaaatggagctggacaaaggagtcctgatcgaggtgaccgagaacatgggcacgactgagacggacattacaaccatatacgaaaagaagaaatccagccagggttcgccacaggccagagacctggtgtcccaagtcccccgcacctccacctcagtctctgcctcagcacctcttctttcctcccagtcatttcgctcacttaacgacttgctgggcatcaaaaggaccccagttggccatttgatgtctccatatgagcaaaggaatcccccacagccaacctccagcccccaggagcctgaacgagcgccgaagcggcaaaggacggcctcggtgatgaatcactcgcgtgcccagggtgaggtcgttgatttgaccgattcaacggattcacctcagggaccctccatgaggcaaaggtcaaatcaagtcacgaaagaaccacccagagccgggggtgattctgcggctgatgtactcctaccaaattgtgagcagaggtcagcaaggcccctggccaataaatccaaagatggaccgccgcatattcagccaccaagaccctccgtcccctcgaccgattttcttcccgctgtaacctcaaaaacagaaatacccaggcctcgaggaaacttgcgcgtggagcagccatcaatgaaccgtgagaaccagtcaagagctatttcacgtcccatcccactacaaaagtctgatcctccgacggtttcaagaagctctttcccaattgcacccaagcggtcctctgctgatggatctgcgccacaggcgccagtgcgtgcagtcaacaattatgtaaaacctatcgagcccgcggacaacgaggcttcaaccaatattccacctccagtcaatgttccacctacagccaacgcaccgccttcaacgaacataccaaccccatcgcgtccatcttctgcacttaactctggtgcacctacggcagttctacgcatgggaaccgcaaagccacgcagaaagctaatgtacagtgctttactgcccggtgcttcacggactccatcgccggcggcctcagatacaccgcctggtagtgcaacgcgtggaaccgtcacaaataccccggagcaacagttagtatgtacgcacccgttaaccaaggtcgcgatactgatttctgcgcaggctgaccgccgctccagataattccgcaaatgaagaatttgtgccttcgacctcaacacaatttgtcttcgacgaaatgacagatggatcagggttcaaatcgccctccacaatcaaaaggttgactgggaaaagatctctcgattcgccactgcgtaaatcgatatcggatccgactgccttgacggcccgccaggccccggcagaagggtcacccaatgcagccaacaaggaaaacgagcccaaagagcaaggcccctggacatccgaggcattagacttgtttgatttctggcctgctggacggccaaagccaaacgagtgaaatacaatggtcggtctgggagtcgtgcatgagtttttaaggaacaatgagcagggtttaaaccaacctgatgacgcaaaggacaagctcctttcaaggctcttgtgtccagtgatgtccactgtctcgtgagaagcagccaccaaatcgccgaaaaccgttgtcgaccgtgctgttctcgaagccaaaccagtgagcagctttctggggtgtgcctgcgagagaaatactattttccaaggtgtatgcacttatgaatgtgcactttgcgagaaagtactcctgctgtggaaacctacgcattcgtactacagctccatccgcctctctccaccgaagccgtcaaacccctatctacggtggatttaacgggcttgctccatgaagtttatgctgtgtctgtttgtccgaaaccaaacatcaagacccagaatcatccctaacgacctcattgatgcgagtgaaaccgtgatagaaacagagctaaccatttgacattgctacaaaaaaaaacttgtacctagctcagctcaaaaatgaatctgaaacctaaactcctttcttaaccaaaaccccagaaatataaggcataaccgaccactcgaaattcctctccaactcaaccctctcccacccaccatccacatcagccacagccctcaaaactgcctcagtatccctattcaagcaacaatccccaataaaccaactccacccaagaacatgatacaacccctgcacaacccgcccaacaagcgaccccttagcccgccgccacgggttaacaacatgctccgtgacaagcaaccgcccaccaggcctaagcatcccatacagctcccccaccgtacgctccatctccggtacggaacacagcacccgcacgcacaggatcgtatcaaagatgcccgcgcgcggatcggtatcatacgcgtccacgacgcccgtgcctgtggcccgcaatgcggggaccagttcatcggctgctacgcctgttggcacgatgtggtacttgggtgagatgttctctgcttgcgcttttgcgcggagagatgcgtgtaggcccttgcatggctcggcgccatatagggctgttattgctggtgaggtgagtagtggcatctgtgtgcctgtgcctggaccgatgtcgaggactatccctgaggctgtgcggaggattggggggattagagctgaggatccgactggctcgggggtttctttgttgtttgggtcagagctcatttggcgcggtgctgtggtggcttggttaggatatgtgtgtttatttgtatacagattgcttcgtttatgttggtagggcgttcttttgctttcccagttctttggcttgtgcttgcaaagagcaagagttcccctctgggtttgttggtgatagatatggtggctgggactcactgctgaattcgatccagaatcttccgaatgcttcatcgcggagtcttcgcgtctgggtaattggggcaaagacctggccattcttgaagactgcttcggcgcagactcggacgtagtctgtagtattggagttagtaatgtgctagtccatggccttgaaaacgagaaatctgtgatggtgcgtcaggaatgtgcaacgatatatcaggatacagttagtcccaccaaaaggcagaagaagatgatacgaaaatggatacagaatagggcaactacacaagcatatcgaaagcacatccatggtagagcaaaatcaggcacagaaaaagcacatccacccgcgtcgaattacatatattcaaatccaagccattcggtgtttgttcggcgtctgtacttacgcgacatggcccaagtcaagagatatgctggctctaacattccgagcatacgcccggtgaaaggtggggggctttcgttcgacattatggttagaaaatgttcaaattcgggtttaacaagcctcaatgcatactgggaggagaaaatgcaagaggaggtttatatagtgagggcacggatatctctcacgtgacacagactttgcggggacttcggcgttcgaaataagcaaatcacatctccagggctgcagctgatctgaagaccagtgaaggacaaggggatgattcttcgaatggatgactatattgtctcatctggcattacgaaatcagaattaatcaggcataatccaacaaaattgaacacagactaatatctagcatcctggtctggtgcaaattgcacaaatactcaaaagatggtcacaccggaacaaatagtggagccaatcagtacaaagacgatggcatcaagtggtaacagaaattatcaacataaaaggagaatataggaaaagagcagactcagattgggagaaacgttccagcaggacgcaatgattgaacgaaggtcagagacagtaggagagttgagatctgtagagagtaaagaaagaaaaagatcgtaggtgaagagaaggcgtgtgaagttgggggtgaaactatccagggagtttcggagcccaagaatccagagtcaccaaatagtacgtaattcagttgagtctcggtcctgagatttgaggtattccaactcgtatgaagggaggtaagttggaaacgctattaaaaggtttgctggttggacaagagacagaagaaaaggagactcgtcatcatctttagaagtgactcgagtctgggtcgaggacctgcccacaaaccctacgaacaaatgcccatctcgttggacgatgttcagtgacggtggggtgagtggatgcggttgaccctcggactgtaccgactggtgcgagaaagtgagccaacatcatgttttccgtcgcaacaggcgcggacattctcgagccggtcttgttcctgagtttcgatcacctgtctcagatcatcggcactttcttggccatgcaggctttcgttgtgaacactaggagtctgaccgtgccggcccttcaagcttgcgatggatccccgaatggaactggagatggtgctgagtcttgacgaagaacgttggcgctcgtcgggaacttgcagagacgagtttggaacgggtgaactgagcgccggtgatgcacgccctccgagagtcccggaagatcgcattgacatcgccgaggccgctcgccgctgttgcttggctgcttgacgagcggtgcggctattgtaagatgagaacgacatccgtgctgtctggcgagaaccagaccggaaaccagggggattgaattcattgatatcgtcaagggttacgctgttattgtcctcgcagttgtcattggtctcccttaaaaggaggtaagacaatgcgttgaaccatgtctcgtgcctctggctcgtcgtagccgtaaagcgaactcgtcggccaggactgacaacctccaagctcctgcagtgaagacctggaggatacgggttgtcatccgcaaccactcgaacagcctcaataggcacactcttggtgcggagctcgctctttccggcagtttgagggtcctgcgtgctccagtacaaagtacgggtgtacgggtgaacccagaagtatcgtcggtgccgcgttgtggacatatccgctgagccggtcttccgagtgtacttccaaaggaattcaccgatcatggtttgagtgatcgcctggatcatacgcggatccgtattgggtccatagccatggggcatggggccagcgtgaggggccatgttgaagcgctcctcgagctcagacgcaaaagatgacaccgaggatcgtcgagacatctggctttggcttcctctcctcattctagcctgagatgaaccggttcttgaagagctagcccgcgcagcatgttcgcctggagtaagtgggcgctgggaattcatgcgataggcggaggcaggtgccaaaggaggccccatgacagaggtaggagatggcggaggcatgtcgatcggcttcttctcggctgccatgatagcttcccggtgatcgacgggcagtggggggtgactaacacctgatgtctgactggcggcactgtgaggccggcggtgtgttggcgttgtcgatttcgcagactgaacttgcgaaagacgaggtcgcgtaggagctttgggtgtcacgtaagctgacgcggcagctgtagtgactgcagcaatctcccgtgagttgtctgttacctggctgtcagatgatagcgggcgtgaggacacacgatccataaggatttgatctatctgtttagaggataggatagtctgggacccttggtccatgctcactgaaatagattgctgtctaccagagcgggcaagggcgttcccagagatatcgttcaaggccagtccggcaccagcgggctggtcactattggcagtgctagtgtggctacgagtagcgccagtaggctggtcttcgcgaacaacgacagcggcacccgcgggcttgggctctgttgactcagtctgagtggataaatctgccgccgcagggataacaactggcttagacttcactggatgagtttccacagagcgaacagaggagaatgacaatgccggtgtaggggcaaggcggggccttgggataataggctccgtgtatgctggattgagggaagagattgtcaaattcggtacctcacgctcacgttcaacgtgcttgattacatccacgtattggacgacaggtggcaccggttcaggaacggttgctttgacggggctagtggatttggcggcgatcgaagagaaggtcaattcgggcacctcacgctcacgctcaacgtgtttaatcacgtcgacgtactcgatgataggcactggtttggtgacagtcgggtgtgcaggggtagtggactggttgttgatgggagagaacgttaactcgggcacctcacgctcgcgctcgacgtgcttgataacgtcgacgtattcgataaccggctccgctttagcaagacttgcatgtacaggcgcagtagattgagtagcgatagaagagaagcttgactctggcacttcacgctcacgttcaacgtgcttgattacatccacgtattggatgacaggtggctccggttctggaacagttgctttgaccggctcggtggtttgagtagtgatggaagagaaggtcaattcggggacctcgggttcgcgttcaacgtgcttgatcacatcgacgtacttgacaataggctccggcacagcaagagttgcctggacagggacagtggagtggttattgatggaagataatgtcaactcggggatctcgcgctcacgctcgacgtgtttgattacgtcgacgtatttgatgacaggttctggctcaggaacagttgcctggattgcctggacaggtactgtcgactgagcggcgacagacgagaaactcaactccggcacttcaggctcacgttcaacgtgcttgatcacatcgacgtacttgatgataggctctggcacggcaagtgttgcatggacaggggaagttgattgagtggtgatggaggagaaggtcagctcgggcacctccggctcgcgttccacgtatttgatgacatcgacatgcttgatgattggctcaggtacgagaaccgttggttgaacgggattagtgttttgggatgaaactgaagatatcgtcatttccggtacttccggcgggggtagttgatgcttcacaggcgtagtggttcccgcagtaatgtacgagacactgagatcgggtcgcttaggtgcagagggcgtggtctcttgagaggaaacgttagccatgcccagctcgggtaggtcaggttcagcgtggacattgccctgttggtcttccaccgaacgcttttccgtttcctcggcgatctcacggtctgctgtttgagctgcgtggggtgcagcgagagcatgcggcaggacagctcccgcagcaagaccggcagctcccgcaacaatgccagcaccgatagaatgtgtaggctcccaaggttcagtcataacaccagaatccaccattgtgggcgtggagggtacatccagcattgcatccgagggtcttcgtgaacccgatgcaggctccatgcgcggtgtcgaagcctgggaggtgacttcatcatcctcggtgctgtcgagctctgcaagttcagcaaagaggctctggccctcttgagctgctggcgcgggcgcaaaactgggtgctgcggactcgcgtgaactcgaaggtcgactggtggacgcgaatgtagcctctccagatggacgaatgcgtctcgacatgctgcgtttggacttcacacggggtcgggagatattcatttggctaggagagccgaacgctctatcgaattcttcgtcatcggaagatgcggaagcagtgctgttatatgaggcgcgatcgcgagctttggccataaccagggaagaaggcacacggcggacaggggttctctgtaggttattttccgtctcggtaagatctgccgaatcgctgctgtcatccgccatgctttcgacaccagtctggaatgcttcgctctcagttgcggttgcccgctcattcgccgtttcaaatccatcttccgcctcggtagctgtttggtagacatcgctaggtccatcggaagactcggagcgagggcggtccctagaggatatcgccttggtgtgggtctgggtaggactgatttggccggcattgtcttcccaatcggtgtcgtgaagctcaacaaatgatttctctttgcgtcctgcgcccagaagatccgggcgaggtggctttcgagacgaatctgtcttgttcttctggcgtttgctagttccgtttggcgcagtgctatcacgacggcgttgctcaacttcatcccgagcatcttgtagcatacgcttgagctcaatcttttcggtcttctcacggtgaattgtgctcttaaggttctggatcatgcgatgagcatgaccgagcgagctcttcaaagtctccgattcaagatggccatgtcgaggagtgaacttgttgggggatggcggaggagagctctcaggtgtgatatgctccggctcgtggccctcgctgtcatatggaacatccctagtgccttgatgttcatgctctcggagcctcatggcaactgccttggcgagttcttgattttgagaggtcatttccatcagcttcttttgaagagcggccttttcagcatcgccagaagtcagattccgccgcaataggtggatttccgcgtcattcgccttctgagtgaggctctgatcttcaagtaacctagcattggtttgcctgagctcctccagctctcgttccatggcgttcttttccgaatttgtcgatgttatagtgctgttgagccgttgttcacgttccgcggcctccctcgcagctgccattaagtcatgtgcttgagtctctagcgcccagttctcgtccttgtatcgttgctcactgtcgtcaagcgcccggattctctgtgcatacccctctgcctccaactcaagtcgcgatttttccaagttaacaaacttgagtgtctcatcccgttctgcgagaagagcttgcagttgccggacctgggccaaaagtgaagtggagatctcagtcgcaaattcgatatcgtggacacggttggatggttggttgcgctgctttcgggatggaacgctgactttgcttggggaatttgtagcttgactggcgaacaaagcgggacttaagggtgactatcagatctcgacgttagttcggctagaaatcggaccagagtcagatgtaagacccaggcagtaccttttgatcgaaagatggcgtcccaagctgagcatcctccgggcccccggcaaggcgtttgggtcccagaaacgcccgtgcggactcacgaccgatctcgttgtactccttctccaaatccgcaagtttgcgtcgcagttccgggcccatctctccctcattctgctcctgttcgacctccttcaactgctctgatagctgccgctgctggtcgataagggccgttcccagcttcgatgcctcctccagtcgacgctctgtctccgccaagtgggcctcgagggcccgtttggcctgtgctggcgaagatgcatttaggctgtatagctgtgtgtcgaaggaggagaatcgattggagtcgccaggcacagctggccttccggaattcgcaacgaaggggtcttccatcgatgcaaatgacccggtggcctcagcattggatgcggtcattatttgggaatcgtgggcctcaaacggcatctgaaccctcttagtgacgaggacacagttgccgttgagatatcggggactcgcggcttgatctttgttgtgattctaggccgcgggcatcatccgaattaccgcgctcggtgaaaggctgttgtcgcaagatgattcccgtcgggatctttgccgagccgaccagcgacaagagttgttcgacgttttttttttttcgagattaccgcacgctaatattgatgcgatgggcgttgaacggcacaccgttcaaagatgtggaagggaagaggggggaaatcccacacgattaaaaacaacaaacaccgaggaccttcggacgaatcagtgagctcccggtaagattggccagacacgcgcgaagagatgcaactaaccacaacaaagtgctcgggatctgcagggcctttggaatcggccttgttggtctgaataaaggaaagactaaaagacaaaaggaaaacaaaaggacagctaactcaaaaaagaaaggaaagtagaaaaaaaggaaagaaagggagcgtagggagtgattggataggtcgagtttggatgactcggcgggggaagaagagggaagagaataacgagagtgagcgaacgtggtgttgttattgccaaatggcgccggtgtttgagattcacgatcgatnnnnnnnnnnnnnnnnnnnnnnnnnnnnnnnnnnnnnnnnnnnnnnnnnnnnnnnnnnnnnnnnnnnnnnnnnnnnnnnnnnnnnnnnnnnnnnnnnnnngatactaggctatattctttgttctgggtacctctaaatttactataaaactgtagaaacaatatgaaatgctgattcgacaggttcctgcgtgttctgctgcgattttcgctatcaaacgcgtcccaaagtgaggaggttgtttgtcctgtttgcccggcccgcgggcattagatctgcttagtcatttctcgatggccgtttcgatatccaacgatatgcgtgcgtctttacaacctttccatctgacacaactgcttaaacatctacgactaatattcaccgtatccaacatacaatatgggtgaagaaactgaagttgcaggctctgttccccaagtcgccttcaagaagcgctccaaaggcaaagccaactttcgcaagaagcccgcgacgccacctcctgcatctgactccgactccgactttgtatcatccgatgacgaagaaggccgacggatcaagagacggcgcaagaatgcagctgtcaccgcatcatccacatcaaatgcgacaaggaaacagcgtgcagaagacgaacctacaaccgcggttcccgctccattgacctcgagcaacgatgccacaaaggcctccgactggtatgatgagaacctaagcgagaagaatttgttgggcaaaacccgggaaaacccagtctctgcctcacagccggacggaacctacaagggcgccgccaactatcaatctttcatccagaagaaccctaatgcaccagggaaattcggtcctgtcaaagctgcgaccaacgtcaggactatcaccgtgacagattttgcccccgatgtgtgcaaagattggaaacaaactggctacgtgagttacgctgtcgcctccatctgtctattgtgaatcgagactaacctatctataattagtgtggctttggagacagttgtaaatatctccattctcgagaggcatacaaggcaggatgggaactggatcgtgactgggaaatcaacaccaagggcaagcaattaagtgggcgagtggtttcacagcgaaagggcgtgggcaaactcgccgaggaagacgatgatgaggaggaggatgagttgctagagagcatcccgttcgcttgtctcatctgcttgaagccctataaagaacctatcgtcaccaagtgcgggcactatttctgtgaggcctgtgccctacagcggtaccggaaaactccatcgtgtgctgcctgtggcgagggtactgggggtgtcttcaacgtcgcaaagaagttgaatactttgttgaacaagaagcgggaacgtgcacgcaaaattcgagaggaggcgattgcaaatggggaggaggtcagcgatgaagaagagggtgatgatagttgattagccggggaagatctctctgtagcataatataacaggcagctggactgcaacacttgtcctctgacaatgtatcaaaacttgtttattttatgtcgatttatctccattggcgtaccgtgaaattgatcacttaacaatgctttgaacatgagacgggaacgcgtaacatgcaaatcagccgcgtgttctttccggcctagtatgattttacaagggtaggcgccgaggcactctatagtctacttggggtacgtgtggcacgctagaccattcaccgcattaagccatgtatacttcatcctgttctgttcaagtactccgtttcccacggagtacgagtacaacgtacaacaatacgctagtccaacaagcgaagaggcaaccctgagatcaccgagatcttcactgatccagtgaagatcagacgagccaagaaataatatcgacgaccacacggcatacaaacattcagtgcagtcgatattccattgcgacgcaactccaacaacatacatgtacagggagcaacgaggcttcttaaggttgctgaatgacacaacaatcaaaatgcgcctgggccttctgaaaaatggctcgcttgaatgcctctgatgtcagaaacgtcattacaagacatccaacatattgcagtgccgctgatcggccaatatgtgggcctgatgtctgttacagccacacgctgcaatcgaaaaaaaaacccacatgctaggaccctggatctttcaagagtccgttcgccgatgaaaatcataccaagggatgccaactgtccagttcgctgtccgagtatgtaggctgtgcatggaaaagggatcatcggagccgaccagtaaaggcaaggaataatccgaacaattttaaacccatttcaaccaagcgagacagccccactgggatacgagcataccgaataatagtcttgtggaggacttcatactattcccattgcggcgttcagtattccaattctggaaagctttttaatttggcagtctcaagcccgacgccacgtgcattccgtggtacgggaaaaacacgcgtgtcgccacagtggattccaatacctacaacataggtaactttgcgatagtctagttaggttaaatactgttgcctcaggtacaacgttttaacggattgtccatttacaaggtttaaactcttaagccttgatcccgtccagaggggtccatccatggctcaagcgtaaactctatggtcaaaaggggtaaagcgtgcgccatagccaagcttttgcttttcccccaaccacaaccaaaaacccaaacgccccttggcatcaaactaaagggcggctcccctgaacgccccagtggccaatgatatgtccatgacattgttaaggagtccactcgaaagctcccctctttctattttactttaatattcccaggtttccactttctactccgtacggggtacaattcttccttttaatctgtccccctttctactttccgtgtcctttattacctcgactacgccttccttctatatcatcttgccttctgactcgccttcaggcgtcttggtactttgaaatcacttgtcctatctcgcatcgctatcatacatcggaaaccgtatatatcaatggcttattagttaaatcatcaacctcgacttaacacctacgggctcctctccgcagagtccccggggtattatccctctcatccatcattcataatgagaggcggtctccgtatagcagggttttccgtctcatgtctcgtcctattctcactatatctactcgaggcgcatctacaagacatctgcaatcaatatcgcgctggcgcatacgtgattaattggctagatcgcaatgacaccgcctcgactccacatggcgagacaacacctggtgataaggtgattgtcatggccaagctagaagaagagaataccgaatgggtggaagaagagcttcccgagtgagtgcttttgatctccaaccctccactgaagaagcacggctaattggctttctttctctccaaacagctggcaacgggcaatctacaccgtcaacccctcacacgagacacgactaaatcccaatgttcttacgaccccattcaacaaaggccacgaagccatggcctacttcacgtatataatcgagttctacaacaatcttccctcgaccgtcgcctttctccacgcccaccgcgcaggctttctcatggcctggcacgtggacgcgccactccacgacaacgtcatagccatgcgcaacctacaactcgatttcgtccagcagaacggttatgtgaatcttcgctgcaattggaatccgggctgcaagggcgtccaccgcttcaatggccatgtcaccgagccggtctggatggaagtcttcgacggcacgagtacgcctccgttgaatgcctcctcaaccacggatcaggagttcccgggccagaaatatctccgcaagcctgccgagattggcgccgcatgctgcgcgcaattcgctgtctcacgagagcagattcagaagcgcccgctggaggattatatccggttccgccaatgggttatcgatacggagcttagcgatgcttcgtcggggagggtgatggagttcttgtggcatgtcatttttggcatggaaggggtatagtaagttatgatcgatcacgtttcgctgtaatgttgacctaaccgttttcgcagttgtcccgatgaacaaatatgttattgtcgagtctacgggcagtgttaaatgcgctctcggcttgagcattcgttcccaaatccagcgacacctcccaacctggtatctacatatcgtgggactcgtggcgttacatccttgcctccaccttttcgtcatgatgtgcatgatttttgcgacacaacacaaacaccggcccactcggaattcaggcacccctttttgtcggatagaacttggagttttcaggggccctactttcttcatagattaattgcgttcaagcgccgaggacaaagttcctcatgcacatactccatcactttcgttgatggatttctggataatcagagtacatgaaatgtatattcttaccattgtctttctcacttcctatgcacacatacatgtaccataccattcagatttctacatgtgacctccactatcaatagtggctccatgctctgataccccccaggtggccaaagcatcttatcattcacgctttgtattttatcagactttaatcaatagttaccaagacaggcgctaaatttccagagaccgtccaaatgtactgcttcagatacccattcaccctgtgacatcaccaggacaagcagtcaagtcaacgtacccatcaggcccggctcccgctaatgcgccctgtgagcttgtgtggcgattcagatgtggaagcgctcgtggatgcattgagtgatgcttgcattgggaccaacccttcatcccagtcgacatcctgatgcaggttctgccaaggccggagccagatttcggcggtttggttcgaacgggagtctgtactcaggtcttgaggaccaaccttccaggttccgcttcggctgcttgctcttgtagtgtgctaaggtacctctcgaggagatcttttcgtggcacaacacgtacgttcccagcccctaagatgttagggagtctctcgccatctagtactgcccgacggccacctaggttaccatgaaggtatccacggtattttgtgacgagggcccacgggtcttcgcatatcagccatatttggttaggcgctagttatactcataaaattagcagagagcggacaagacaataggacgaggaaacacccacgtcgtggaaattgcggggataagaggtagtggtacaggtaggagtcttgacgcaaaccacccatccccaccagagctgtctaggtcgtctttgtctgtaatgcccaggagggctatatgcgatgccgggggaaggtcggggggcagggtatcagggactcaacagactaagaagggagagaagatctaagatttaaatagatatctaaaaaggactatataaagacatttgggaaccactgaaaagaccactgaaaagtccactgaaaagacctatgaaaagacctatgaaaagacccatgtatgaagtgactatcggagaaggctatctaggaagactaggccaaccttggaagggtgatctctttttctacccctgtagttgctagaggtattttctggcattttgcataaagaagtatcggtgatatatatcagggcgttcacgccttttaccggcttgcgcctttgtatacatctgaaaagacatcgaaaaagaaacgccggtatattcttatatataatgtccctaacatcatcctggataaaagatatcgattcatttgaaatgactatgaccttatggaaacaggcaagtaggatacactcataactcattaaacgggccgcagattacagcaaccttggaccaccccaagacgatcctgagcaaacttcaaatcaatgtttaaaacttctgctcaaagtactgctcaactcggtccacgagatctgctttctttcctgctgtagcacggccatgtgcatgcaagaattccttcagcacggccaccgtaagctgaaggcgagtattagtttggtcaatcacctgggagaatttgaatgctcaccttggaaacagtgcctttcgcatagcatttcttcacttcgtcttccactccgggctcactgtcttcaaccttcacccgctttgatgggtgctcaccagctgcctcggtcttggcacctcgctttaccagcgtagaggtggcggctactgacccaccaaacatctcggaggcttgcaatttcagttcctcggcccatctaagaatatagtcgccagcgcgctagaacatccatttggtcagtacgttcgggcatttctgggatcatggaagcagccaaccttgtgaacctgtcggtacttaggcacggtcttgtcatctggtgattctgggaaatcttcatccaaggcgatagcctgtaagatacgataatgccattgaagcgctgcgaatcagtcagtatcattgtcccaaagattgaagtgacgaaggctcacaaggattcggatattttgaaggatcgtacacagccttggggagctgcaactggcgaacaacatctcgcatggcgtcgttcagcgcatctcctgcccggtggacggtgctctctggattttggcgcacatcatctgcgaaaggaagagggataatccacatcccaggtggaattttctgcacgccattctcgtcgatcttctcagcacctgcaatcatagcagctaagactggtgaggcatttctgcgggggatgaaccagaccaaagccagtttctccgattcgaggagtttctgatgcagtgcagaaaagactcttgttgaaccgacgtagtcctcttcagagggataaataaacgaggggtgcttgacattggcccagaacgggagggctgacagtggcttgaacccaataatacggatcaccgggtcaccgaagcttcttagcgcctgttgttcttcgatggtgaatgatacctgctcgccaccaaacttgtatgccttgcgaatgtcagacttctcaatctcctgccctgtgtcatcagacattagagttgtgactcctttggcaatctgagcagtctcgcctccttgccagacgaagcaactccttgcaggctcttgtttcttgagaagcaaatatccattgacggatattttgaaattaggtccgatctcaagtggcacatttgagaacagcgatcggcgggggacagatcgtgagttgatgctcgacaacagagaattgagcaatgaaagtccatcgcctttagctgttgatgtgttggtatccggctgtaggtatgcaggggcatctccatcactgggcgatgttttgtagataatgtcctgccaattgtgagtatacccctatgcaatcaaggttaatgacctacgtcgtagaatttagaggtgtcgaattcgtggtctggttgagatatgggaaacaactcgatattgacaccaagatcgtacaagtccctcgcacgaactgttgcagcagaccgcattcctttgttgtctgcgtggggattatcgttgtcggtcacgacaaacaggcgtcgagaagcaaagtttggagcttttgaggtaaagatttggttggcgcagaaaagcatgttggccatggaggctggctcctttgatggctccaaaacttgcagtacgtcatcatcagcatctgctggagatgcgagggaccgcagttgcttgacttcctgggctgatggaacatcaagatccgtgtacagataacagtgaggatatgagagatctccacggtcatcctcattttcatcatagaacttggaagattgcgttccgtaaagcaaaacgccaatcatgtcatgagggttggagatgatgcgttgttgcatcagatggtatgcacacttcaaagctgcagacgcgggtgattcgtctccatgtttcttaggatcaggcgatggacgaggcgtgagcatcgaactgctaatatctatagcaaacagcaccgcatctttgactgatttgaagctctatgtaggcaaccgtcaacaatcggtaactatatctccaacttttgatactcacggtctcgtcgagctcttcatcctcgtaattctcctcctcgcgcgtgtagctatcttcaaccattgttacgaagtaggtatcctcgggagattggaaatattaaaaggtgtaaattaatcaagtctaaagtatcattgagacgcgctcgttgacgcgggcaacacgaaggtcaggtgacgctgatgcctgaagctgctgacatcttcctgcgttgattggtccaaatccggtggtcggaagctatatggggcaagcaggaccggattcaacaactccgaggtccaagttggaagttggaagtcggaattgtcatctcttcattaatatatcagcattatttttgctctactcctcgatataatatcttggcctcttcgaaccatgacattccgcagccctttcgcgatcccccgacagctattgactgggaccacatctcttggaggtcggtcggcaattagcactcgattgagatgcaatcaacgaggtctcgcgacggtagtaccgccagtcacacaagatgcgacgggctctaagggtcccacggctatggtttttatgaacatgggtggaccttccacaacggacgaggtggaggactttttgagcagactatttgtacgcatcataaattgttcaaatcgcggctttgaatcgatatgttaacacattgaactacaggcagacggtgatttgattccccttggacgactccaatcgtatctcgggcccctcatcgcacgccggagaacctcgaagatccaaaagcagtacgcggatatcggcggcgggtcgcccattcggaaatggtccgagtatcaatgcgcagaaatgtgcaagctgttggataagatgtccccggagaccgcgccgcataagccttacgttgccttccgctacgctgccccattgaccgagaccatgtatgagcagcttttcgccgatggattcggcaagggcaagggaggacgtgctgtcgcatttacacaatacccgcagtactcttgttcaacgaccggcagttccctgaacgaactgtggaagtggcgtaatcgtctcgagggaaagcgcgcaaatggaggatccgagccggctggcacaatccaatggagcgtcattgaccgttggccctcccactctggtcttgtggaggcgttcgcacaaaatatcgaggctcagcttaagacctacccagaggagaagcgagacgaggttgtgttgctgttttcggcccatagcttgcctatgagcgttgtgaaccgaggtaggctgatgtcccctgattacttgctagaattacactaattactctcccacacaggcgacccttaccccgcggaagtcgcagcgacagttcacgccgtaatgcaacgactcaggttcaaaaacccttaccgcctgtgctggcaatctcaagtgggacctagtgcgtggctcggggcccagaccagtgatactgttcaagagtatgtgaaaagaggacagacggacttgattctagtgcccattgcgtttacaagtgaccacattgagacactctacgagctggatcaggaagttatccatgaagccaacaacccgggtgtcaagcgcgcagagagcttgaacggaaacccagtcttcattcaggcacttgccgatattgctcatgaccatttgcagaagggagaattgtgttctcgccaaatgacactgcgctgccagggctgcaccagcgagcggtgcttgggtcaaaagaaattctttgcaggccaggaacaagcttccatggtgatataagctgagtgggcttgagcttttccttttcggaccaagagagttcatccttgggtgtttgtatatggcacttgtaggtgttggaggcgttagagtataaaatttgggattagtgtacggtataatatgttttcaattctatacaagttggcaaggcatccacgatatatacgaaagggcaggccgtcagaatgacaccccagtttaaccgcggcacctcctgggaaagcacttaagtccgtgcggagattccggagctatcgattaccaatgatgaaatcccgataagaattcaaggaatcctaaacacttaacattctcccctctttcatatggggatgaattgtctgtggtttcagatcttatatatcaacatttgaattatacgataaccttggataatcctggaatcacctccaatgcctccaatttcatgatggagaacgaagaactacttgcgggggatcccgatgttgcccagctgcacacccgagagactcgcacaggagatgtgaatgaaaacacgcctctaattgatgaagccgatagcctgttgcatcaacagcctgtttatgttacggatagtcggccgaaatggaggaaaccgagcgtgagtgactatggcttgcgacaacagcgtcaggaacaactttctaatctgcaaacatgatagatttggtggctgcttccgttcggtctcctctttaccctgggctttggtggaattgccgtgcccaagatcaacctgatcatgtcgctagtctgtcgagattatctcgccgaaaagaccaccaaagaccctggcttcacctatctccctgttatattcggcgaaaataacccccagtgccagataccacaagttcagtcgttggttgcccagttccagctctatctcaatcttattgccggtattatatcggcattagtgagtccccggttcggacacttatctgatcgttacggaagaaccaagatgatcgctctaggcgcgatgggcgcggtattcaatgaacttattactgtcatcgtggctcaatggccagagcggttctcagtcaatatgcttctggttggagcagtcatggatggactcggtgggtcatttacaaccgcacaggctttgatccattcctatgcttctgattgtacgccaaccgaaaagcgaagcgtggcattcggtttattccacggtgctctgttttttggaattgcagctggaccgggtggtgcagcctttttgatcaaacgtggaggcacgctactagtcttctacattgcgcttgcattccatgcaactttctgtctatcggtcttcttcatcgtgcctgaatccttgtccaaggatcgacagctcgcggctcgcgagaagcatcgcatgaaaattgtggatgctgactctcctaaatggtactcttggcgtgtctggaacccagtgaacctgatcaccccgcttgcaattctgatgcccgccgctggaaagccaagcgtcttgttccctaaccgccgcggtgccagtcaggctctacgccggaacatcattatgttggctgctatcgataccgctgtctttggagttgccctgggtacaatccaggttatcatcatctacgccgaatacatgttcaactggggcagcgtggagtccagtctgtttgtggcgaccattaatgtggtgcgagtggtcaatctcttcctggtgcttccgcttatctctcttttcttccgcaccccttgcgaggaagacggaaccattcgcggctcggacacgctggacattgttctaattcgcgcgtctataattttcgatatactgggctacgttggctatgctctgtccaaagcaccatcagtcatggtgatgtccggagtcgtcgcctcgctaggtggcatggggtctgcaatcctacagtcatctctgaccaagcatgtgcctcatgaacgcatcggacagatgctcggtgccactggtcttttacatgctcttgctcgagttgttgcacctactatctttaacttgatctacagtctgactgttgcaacgttgcctcagacagtgtttgtggcacttgcagctgtttttggtgtagcattcctcatgagtctgctaatcaagtcgcatggtatgtttagtcctgagatcctatgggcactatgctaattgttgtgccagttaccctagagagtggccgccctgccgatctaagagcggaagaagatgccgacgagcatgatggacttttgctttgatagacagctctgtgagataataaggttgcagcatatgttatatgcctgctttgctggcgtcttttctaatggaacgtgttctacatgattgaaatagactgttttttttttttttttttttttttttttcctactctagagagctcctatccgtacatatgtaggggtatctcgtgatgaagatgcttgatgcatgctaaaaacagaagactacctaggtatagagctattggacaaacaaatcatcgtgatggtcgtggaataactgtagaatatggtatgggcagctcgacttcctttgacttagacattgagcccctttccatgtatttcttctttcgagacaggtttgatttttgaaggttgaggacaggaagctgtggaggatgtatccggttagatccatggtcgtatgaccgagccaatctccggcgggcggcagcgtcctaatacgcaagttgatttgcatcgggaaaaaagaagttgctccgaacttaccctactctctcagcttcaattgcctgtacacttaatcttgtatcgtacctggtgattggagatatctacgtttcattgactgcacctagctgctcattttcggaacattggtgtgaggccgctcatgcacgactggtgaactcgcgcgcaacccgcgctcagcatccacaaatatgcttgcccgcgccgcaaaatccggctcaataatcccttctccaaatgccctccgagtgctccgccaattggctctggccggctcaacagtcggcggattctgcaccgtcgcagccctcacgtacgaagcccatcgccgagtccgcattgccgagaaaatcatcgagaacaaacgaaccttacacagcactgccccgaattatgacgcaacatctgctgccaaacgactcaaggtgatggttgaggcggcggaagcgggcgaatttatgggcattggatccctcaaggcgaggaatcggaacgggcctgacgagccagggttcgagacagaaaaggatgatccaaagcccaagcctaggcccctggtcagcttggaaaaacaccatgctcgctcaaaacgctcgctttttgggacccatccaattgcacaatccaactacacgggaaagatcgatgctccgagcttggctcagaacgctgaaattctggctcgcgagaaacagcagggcgagctcgcacaagaatctggcaagctaccctttgacgccgaaatccgcaggctgttgaatgaagagcgggaaatcactgctgcgaatttgttcttagcgcacactcgacagacacctaacatttcttgggaacgacgagagcttgcatgtgttatattcactgcaaactgcatcaagggaaaccttttcgttgctcgaactttgttcaaccgcctggataaagtcagtgtcgtctcagcggagatgtgggctacactgatgcatctgcttgcaaaggaaggccatatcgactctgtcggcgtcatatatgataaattcagcaccagctttgctgttccaacacatctgctggaggtcatcctccgatgtctgatcgagtcgaagaggttggactctgccaaattcctcttcttccaacgcttcgaggatgaccgtgactgtggtctgtgtggtgcttatctagatggattatggaggaaaactaggagcatggaattgctgtcatcccaattgggcctcatccttaaacgtctcgaatccctcggtcggcaaccaaccgagaaacttttcaatccaatggtcaaggccatggttgaaactgggcgagccgaagaagccgaagctatggtcaaggagatgtcaacacgttatggggccgagcctggatgccggaccattggcttgattatctacaaccgagcacttaattgtgaatgggacagggtcatggatggcatgcatgctatgcacgagcacggatacacccaatcaaagaaggacttcgctatgatttttgaccgcgtcttcttggaatactatcccacccacacaggcccgcaaattctcgacttcgtcatctcttgtatcaacgattttgacatacaacccgacaaagtactccaccgacacatcctcgaagcgatcattgaaaagggcaacgaagatatgatcacaaccattatggacatggcccacgagcagaattggaataccggtattaacgatcggtttatcaagtcactcctgaagagccgaaaactcgcaatgaccgacaatcctgtgggaatctggcgactgaagcaagccgccaagaaccgacaagatcatttaacttcttcaaggcgcatccttgggtctagttctgatacttgggcggtacgaggagataaaattgccccgattcatattcccgctgaggaatctttccctcaaacggtgagcgagatggtggcctccaaaactgccagtttatacgttccgctccacaagcggatggagcactttatcaacatgggcaggcataccgatgctctggcaatttacaaccacgccaccaccggcgggtacgttgtcagaccgcttcatttgaagctggctgtgatcgccgcgatcctcagctgcaaaaagacaggcctggcgaacgcgcgacgtctgattacatctgaatgggattactggaagaacgttccttctctccgttatagcaagcgtttcacttcgtggattcccattttcttccaacgggtcatggaagtggacccagaagcccttgggtatggaggcttgatcaagatggccatttttgaatattatgatgtttgtgccaacaccaatggtctttcggtgaaacacttctgcgcgacttcctccagccgttacctcattgggggtggcacgccagaactggccgtcgatctcctcacgacaatctaccagtctcggtggcggctctctcatggattcgaccaggtgctattaaagatgctgctgcgtgcgttctccaaggttcacaacttcaagggggcctggtggtgcataatgacagtcctctcgcggaatgagcccatcaaccaggactttgtcgtggaagctacctctcagttgggctcattggaaaatgccatcagatcctctagctcctacgatgccgcgggtcaagtgttggtactccggaaaatggttggcgcgctggaggccaagtttgaaggtgattcgcgttggtcagccgtcagtgttcacccggaattgaaaaggtcgaatcgtgccaagccgttcgagcccaccgagcaacaacatttactgcccaccacagacctaggggaactcatcatgagctttgatgaagagtgggaactggatctcttactcaggcgcaagcagttcgacgcccctgatcaagcaaagtggtgggctgagtcgaatgtcacaaaatcgcacaccgtcccttcagaagatcccgaatacccgtggaacaatcctgcgaattggggacggcattatgtgcccgagaagtactcgtccgactatcaccttgagttttcacctagaggggaatacgaggagtatatggagtatgaggattaccaggggcatcgggcgtgtcaatgaatgtgtataataatgtaaatagtctgtacaatacctaggtagacatcgatagattcataaatatatacatgtacattgttgtatatctcccgaggtcgatatcactcgatcagtccacctgaagtaaacgtgatgttccctgcggcgtagaattgagaaggcggagagacgtgacctttcacatgtcacgccacccctttctctccgcaaaggaaaaaaaaaacaacatcagcccataagaacagccaatcgactttcctataaatcaattgctcaagccgataatggtcctgcttccgtcgactccgttctgacaatatctactcttttaaaagccaaaatgaccttgctcaatggccacgcctccctctccccggccgctcaacgccgcatcgaacaccatgaagctgatattgtaattgtgggtgccggagtcctcggctgtgcacttgcagttgcactgggaaatcaagggcgcagtgtaatcctgctggagaagtcgttggaagagcccaaccgtattgttggtgaactactccaaccgggaggtgttcaggcgctcgagcaactagggctacgggattgtctggaagatatcgatggcatcaatgtgaagggatactgggttacttactttggggagccggttctcctcgaataccccaagtccagcccaacctcgcctacaccgttgggacgagccttccaccatggccgattcgtgatgaaactacgggcagccgctctgtcgtgccccaatgtcacggtggtcgaaaccaaggttaccggcctcatcacatcctcatatactcaggaagtccttggagtcgagtgtataaccaaggatgtcaaggactgctacttcggtcaactcaccgtggccgccgacggttataactccgttttccgcaaggaacaccaccagtatacacccaaacggcgctcaaagttccatggcttggagctcatcgatgctaaactgcccgctcccaacactggtcatgtgcttctcagcgataatccacccgtacttatgtaccagatcggcacccatgagacccgaatccttatcgatatccctgataacctgcctgcggcctcggtcaagaacggtggtgtcaagggttacatgcgaaacaacatcctgcccaagctcccagagggtgtccagcagtcgttctccgatgccctagagaagggccagctacggtcaatgccgaactcgttcctgcctgcctcggccaacaagacacccggcttgatgattctgggcgatgcgcttaacatgcggcaccctctcacaggtggaggcatgactgtggcgctcaacgatgtttgtgtcatccgcgaattgctcagcccagagcgcgtgcccaacctctccaatacaggccttgttctcgagcagctcgcagagttccactggaaacgaaagaactcatcttcggtcatcaatatcctcgcacaggctctctatgcgctcttcgctgcagacagtacgcacgctcactcttcaggttaatttgcaataactaactgttcattcaacagactattacctcaaagctcttcagcgtggctgtttccgctacttccagattggaccagttggcggccctgtcgggttgttagccggtctaatcaagaaacccctcgtccttgtcagccacttcttctccgttgccttcctcgccatctgggtccacatatgcgatacccctctgtccaagctattcctagccccatactacgccgtcatgatattgtacacagcctctgtcgtgattttgccatacatctggaccgagatctggtactgatctggctcgaatcccgtcgagtggtgacctaatttcccttcaaaaagcgacaatggagaaacccagcatatcattctccattctctccctattgaacatatttgtcgatttcaccaagtctttccgttttaatatcccatcctcgccctgcttttgtcctttcaatgcctttatgtgatttaatcctgtccagcattctctcactacatctgatacactacaagatctgtgttatggatgcactgtactatataccaatctgccatactattatctctatgataaatgatacaatgtcaataccttccaaaccttcccagaatcaacgctatccctccgccaatgctacataaaaatgcccaaccaaaaaatcaaccccagtccattcatatcatttcacatcctcccacccaaacttccaaggttgcttccagtacacatacaccagatacaccatgcaaacacccacgatatacccagcaagccccatcacaacacatcaacacaaagcagatacgccaacaccccgaagcaaaacgaaaacgaaaacgcaaagaagttaggcgcaatcggcatcggggctgacacacgaccaagccagggcagaccaaacccgagctggatattcgaattccaattccaattcagagagaaaagagacatgacggcactgactgatcggatggcgtaattttgcacgaaggatatgctagaataggtctcgcagattacgccgtaggcgaagaaaaagcaataatacaaatacagcatgaatgagaggaatatcatccacatgttttcttctttttctttttctttctggggttttgtgggattttgctggttgggatatatataccctttttggtatatacgctcgatatgtaggcgagtcctttatggagtttgtggtttgtcgtggatcaagtggatgctgtcttcggatgggatttgttctcgatgggttcaggtagatgggagaggatgagcatgagcatgagcatgaagagagggagagaggttttgaggactgggacttctttgttctcctccctttgttctctgtctttgttatttgcatgacttcgctcagggcatcaacactctgttgacggcagggtaagacggggaaatagcagagtcaaacacaatgccaggccctcaggaagtatcagatatcatgacctgagcaggaaaggaagggtctttttcgaaaattttggtttgtttctcattggcaataagttaatctctttctcttttatacagaaccatggccgaaaaaaaaaaagaaaaaaaaattggcataagaaagatgaaaagcatcagaccgggtctaaccgtttgaacacaagaactccaatcaactggaaagaaatcgtctcaatgcatgggaggcttttcctggaaaatgaaccggccaactttcccgatggcaacgaatgcatgcatatatggaccctgatccctcatgggaaaaagggcaaataaaagaaaagaagaaaaggaaaaggaaaaggagcaaaacaacgtatttcaggggaacgtgagttcgtttggggataccgtgtggacggcgatggaatcaggctgatcatgttggacgtgagtaattgttcgatcctcccgaggtcatgatcgtgctggagatagaagcgtaagaaacatttggtcaaccgccttttcgcaaagaatcatctgctggaacgagctcatgaccgctgttgatgccgtttcgaggctccattgacgacttggtgttcttgcggtttttcttcttggtggtctgccatccatggttgctctcgttcgtgccgttactctgtccaccagatcttcggggcgggtctgtgtgtcgatccttggtgcccgggacagcgttgtgagaaccgtcgtgtcggccttgacctctgggcttgctcttgccactaacgccgttcgccttgtcaggatgatctccattggtccggcgcttcgagttggtcgactgatgccgattctcattaggcccggatgtagtaagtttctcgctcgtttgtcccgagggcttagccgggccggtttcctttcctggtccttgtgctgtgccatttcttggtcgatccggacttgtctttgcgggttgctgtactagcttctcggaattcgataggtggtagttctgcagccgactagcgagaagctcagattggccattcacgtctggctgcttttcccccgcaccattgaccttttgagtttccgtagatggccgagtgaagacggcggagtgctccaagtcaaaagacccggaatcctggtaatcttgagacaaggaatcggagaaacttgcaggcgtgttcatgttgtggtcatccgaggacgtataatggcttaccgcggagtaagggtcaaccaagtcagacgcgtacgccgagcggggttcactcggacgcaccgacccatcgacgatcaacggaccgggtgcaactggacgtggagcggattgggcgggttgcgacgggggcttggaggttggggtgtgctccgagcgagcagtttctgacgagaacgatcccggtcggtaatctggttgaagggggacaaacgaatatccattcgagaccagacccatctgtgtggacaacggcggcagcatggaaccttgctggaaggcttgaagttgttggggagttatataataacccaacacatcttgctgtcggttgtcgtccacagagtttgagcgggatccattgctggccagactgtttgaacgcattacattctcgtcaccactgccttctccgccttctgatgactcagtggtccgcctctgttttgaccagttatccgtgggtggcggcatggtataaaggggaatatagctggaaagagagggcgagccttgaggccgtgcaggctgtgaatgcgcacgaagggacttcggggatccgttggcagccgacaatcgccgagaattacgacgagtatcaggcataacactaacggcagatggcgagggagggttggtggtggtcgcttgcgagccagatgcaccaactgaagcataagtagggttataaatcgtttggtgtcgttgagtcgggctgagagtggcgtggcttgctgttcctgttcctgatctcggtcgtgaggtttcctctggaaagtcttgctgttgagggactgggaattggataaaaggctgacggataaataccggaggtggcctcccagtgatcagtgcctgactatgtaattgcatccgcaattcttgctcctgcgcctgcaacagctgtatttgttggtataactggtcatgcagaagatactgggcttgctgttgagcatgcagggagatatctggggcattgccagtgttctgctgccggaagtttgacttgtttccggtgtttgactgtcgtcgcccgccagagagcccgcctcgcgagaactggttattatatctgccgcctcggtttcctccccgtccaccccgcgatgggagggaaggtgtgagagttggccgcggctggggtggtggtcgttcccaggtccgctcctcttctgccgggaattcaaactgctgacaacacccttctagatcaccatttgcgatatacttgaaagcccttcgcaattccaaatgtaatccccggaatgaggtgtcatcggcggtgtttcctaggttccttgacgtgttgaacggctcctccacgcacagtcggttgttcaacatcaggtgccagcccttggcttctttgttgatcagggtgccgtcccgtactgatatgacattcttctcatagtcaagctcgtagccataataccggaaaaattgaaagagcaactcgccaactgattgcttgttcttgcggccaaattgagacaaggtcttgaggtcgtcatcgaacgagcagaccaatccatcgtgagtcatcctctttttgtgcgggcgtgcttgcaaacttggaaggattggagggtttcttgtctgcaggaaattaatgatcaaacagatccaggtgtaagaactaagggttcctccaagggctgcgtcattgagaatcctttgcttcgtccagtgcttgatagccattgccaaaggccgaactctttcgtccacctcaacataggtccgaatcattcgagtgttttctagcgccaaggtattattgacattcatgtcgcaggccaaccggagctccgggtcccaaatcttcacgatggggacctttgcgtgcgacacacacaccacgcgttgcatcccatctgttcaggtcagtctatcattcagggttaaggtttgtcaacagcgatctcttacgtttagctaacacctcagccaacaggcacacatgctccaattccttgtagttggttgtgatgcaaatgtccactgctcaagttagtatttgttttgcgctttatctctcttttgtccaaaaaggctggggaaagcctaccatccgagtcacttgaacagagcttattccctgacgagccaaaaatgttcgccttaatattatgaccaggccattggtcgttgaaaagcttctccaatttccgaacaagctgtcgtcgtcgatcatcactctcggcggatggcaataatcgatcatacaggtccatgatctcggttgacaattttttctcctcgtccgagctgagttgctccttcaatgcacccttctcctccggtagtatatctgcgcctaagctatacggtatccgtcgtcgaaaatacgccatggcggtctcatatttacagcctccgagcggtttccgggagaatgggggtagatgcgtggcctcggagtgggtggatcgaggggaggtgcttccgcgggcgggggacggcgaccgggagtggaacgataggttgcgcgcatgttgatatggggtggaagggagagaattggactggtgcgaagtcaacggaggccgaacggcgggctcgggcacgtcggattgtggcacatcggattgcggcatccatgccatcgtggagggctgcgccgacgctagcgaggcgacgtcacggtggagggaacactttgcattcccatcgatttttgcgaccatatagcaatttgcaactcccacaccgttgtggtccttctgtatagggtgggtgctcggcaaaagagataagagtccactcccacacaccacacaatataatcccctcagtttctgctcagttggaaatcaccggagaaattttgtgatcgatagattcgagcgaggcaggttatggcacgtgtgtaacacgtcgaaggttcgttgatatggtgagacaaccgggaaacagatcgtttgtggtgggagactttcaatcgccctccaccaaagtcgcgaagagccgaattttttttatctttcactcgggaccgataagaattgaagagatgtaaaaaaagacaatgcctcaaccaggagatgaaaataagacaaaaagaaaatagtacggaaaaaaaaaaagacacggtcttcgtgagagtgaagagagctgactttcgaggattggatcaaagaaaatgagacaaaaaaggaccaaagtacaggatgatacagtccgtttgccctaaaagcaagttgttaggaaccagcctgggtttccgattgtttttggagaggaagcgtagccagagagggggatttgagaagttgtgaagatgaagccctggaggtcagcccctgtcggcggtaaagagacactgccgaccgtcccctcttaaagaactccaatcttgccaacgtcaacgattctatgtatatacaagtcgagtaatcgaatgaatatacccagggtaggtatttccaggtttgaagatacgtgttgagtgagaaattccccgttataacgttggacggagcagcccacggagtcagactattgggggatagctctctaccctcatttcttatgctaacaattaggggctaaacttctatcctttgtctctaacatgatctcacgcttatctctttctcactagtactctttattctttttcccctgacccccagaaaccctgaaattcgaaaccagaaggttaaaatgcagccagagttgcccgcagtatcaccgagctatgcattcatgcaggtaccatgacgacaagtttatcgataagacagtcttgttcgttggccgctctggactactagctattcactgaacatatcaattcctaaggaaaggcttacatggtccatatattgtacactccttttccctcctgatcgtcgttcttcactcctccccgcgatcagcatggtccttgcacgtgctgctcactagtataacttaatccatgtcaagtggcctgaggcatgaatatggcaatgtgctgtctcttttcaaagaatggagttggaatcgaggattctgctgacaactctgcatcttgacttgaggatactcatacttctttgtttggagaacatggaccaccattggacccatactttactccagagtccgaacagtggctcttcgaatccgatgacactcgagacgaagagccttgtgagataatattcattggaccattcgtctctggggctaacggaggtatcagtcgtaagatggtagcctttgtttattagggcttgggctcgccacattgggaacatgaggcttgttttggcgtgtttctttgtaaatcaagtaaccaacttccaagactgaacggtttacccctcttcaacattgagctatcgaggtagctctggcttgtgacttatagtccagccttaaccccgaagaatcaagcatccagctagtatggctaggaccaaatacggccgagcacagtcccatgtatgacaagtggggagttattacgcttcccaaggtgacgcggaggcatgattgagcgtatcgtttatcgtgctagtggtacatttccggagggtttgaagggaagtcaacttaatgcctaggtactgtccactggtaccttcctgctagatcgacatacaacatagacgacaactgggcagagcttaggggagctgatattcaggtagacagactacggagtacaaaacacaaaatccctcttctactttatatatctgagtacctcagtgcccccaatatcccgtcccggagtcgattcaccccgatcacatagaaatagtctcatgtacatgcgggggaggactcgggctgggctgctgactggtcgagccgggtgagtacatatattgtacatgaacattctagcggccaatccagttcagaggggcgcggaccttgcggaagaatataaaaaatggacgttgccccacctctcctgaattgaccgagctggtcaaagcaccgttcaaagtgtattctggaagcaatgttactatcgcattgcgtctactcctgtatgtagatataatttctagacttacttgttaataaggctttcaggggatttgcttgaaccagatgtatacaaggttctctacattcgaacaggctacggagtatagtgggctatatatacttattgcatgcatttgtcctggccactatacatggagctgcagatcacattcctgatgcgactagagtgttcacttgcagcctccgatggcgtccataggcagcgtcttggcaagctgactgcatagtgcagagtctttgcagtttccaaggcatcatcatacgttgaccccagggaatgccttgtttatattgggttatattacgagcagaatctcagaaaccggattttagaaacttggagacttttttgaatattgtactgaaatagagtatacagaagacttagggcatacaacataagggcagcacaatgtaaatattcaccgttttaagttgggaattaccaagtttctaagattcgaacatttagattgtagatgtagagtagaatatatacattcaagtatagaagtatacagtaatgaataataagtaatagtaactatcagacacgaggggagctcgacgcttagacacacgcccccgtgtccccgtccaatctccggtgaccggccccagcagtgacgaatagaagccgttgggttgccgggaattgccgcgtacttgggatcttcgatgtacagaaaaaaaaaaaaaaaaaaaagggaattggtattaaatgaaagcattgaatgacaaataggttgatttatagtagaaagagacttagtatgtagttatacttatagtccatatccaacataaaacagaaaggaaggttaatatctcagtttatctcagtttaatacctaatatgttgtcctacttaaaaaaaacaaatacaagagtcaaaagagagtctcctttttttcccccgtatactaatataatacatactaataatatatactaatatgtacggagtactaactattttactcttttacattacaatttatgaaagccccccctctccccccccataaggtaatacacacccacatccccccccagaggaccctctccttttcttctcttcttcatccttccaatctttggactttctctgcctcgttgactcgtggtagaaagaaatactcggaggcctatttcctgtaagtgtgatattgtttctgtttccaattggggagaaaaaaaatattctatacatatgccccaaaatagtttgaaagagcgcagaaaaaaaaaacaccctcgaaaaagggtttcccgagagattattatttttcttttgcgatcttaaatttcgatactttcttttgatgtgttgaaaagaaagatctggagaactggaacactgttcgaaaagtgtgttgtggatcgacgctcacattttttttttctcgacagatcgcctctgaccggatcatcttcccccctgaaccgtcgcaccttttgatctcgacaatgtcttcgtactacgaacctcagggctggcaagcacccgctgcgcgccaggtctcttgggagcagccggcgcctccctcccggtcaggtatgggatcaaatgccgagcaccccgagcagaaaactaacatttgacaggatcgagctcggtctcccagcgcgaggatatcccggccttttcctcccaatttgacggtacggacacacttctgcttggatccctacaattgcctctccaaaaccgaatcgcataacggggaaatgtccggtgattttgaagcgagacggttgtggagatgatatgggcatacttgttttttttttttcctttggggaccctttgggggacgagtgctgatcttttttttttcttctcttcagaggtcgatcgtgcgatcgacaatctcgtcaagagcgggaagctgtggaatgctcctcggcgggattcgatgcccatgatgatgggccggccctaccccgactacggtatgttgcgggcacggatgacacccagaacgcgtttctgacttgtctcttgacagaccctcgcatgggtggtggccctcagcgacaccattcgatcagcgagttcgatggcaaccgcatccccccggctggcaatgcccagggtttctatgcctcccagcggtaccagggtcgtcccaacgaggtggaacagatgatgcaggcgaagcgtcggatggcagcacagcgtgagagggaactccgcaactatcaccaggagcaacagtacaaccgaagtacgtggtagcgtctgtcttcttctttttgagccttgttatattcccctgtcggcttttcttccctcttctctttttcttgtcacatccttgcatctatgtatccgtcggcctgtgtaatatatttggtttggcttcttcgtttttctttgaacacggggttttaatacttttcttcttcctttcaaggcctcctcgccgagatgtctgcatccaaatccgaccgctccaccagcccggctgccgtgagcgaggacagccgtcgcgaactcctcgcccgccagcaccgcgccctgtacggcaacgaaagcccagccttcttcccgcccggtgccttctccgatgataacccgcgcccagatagccaagccggcggtggtaccccgtcgtctggcgtgcgtggatcctccccgcgaggcatggacccgttcggcttgacacaggctggcaccactaacgccgaagccaccacgggcctgcagtcaccctcgcgcgccaacagcacctcctcgcctagctccgccatcaatgccagcttcggcaccgagcagcccgtaacttcggcctcttcgcccggcgccgactcaccctcatcccgtcaggctacttccaagccggctgctggtcctatcggttccgtcggtcccatcggttctcggcctgcccctggccagacatctgctccccccgccaacccggccttgaacaagcgctccatcactcctctcccctccccgctcgggctcggcttcacccccgctgaccctactggccccgcgacagagcgcacctcctcggccggccctaccccgcctgtgacctctgctgctggtacccctggcacgaaggaccaggctggtggtgttggcctcggctggagcaacggcagtggcgtctggagctctaagagcgggcttggcgtgcaggcttccgtttggggttaaaactccacacccacaccgaatttctgatttttgatggcattactccagtgggcgcttgttgcatattggactcggggttgagctggcttactatataccaggcgggggaacaagacgaaggtttactggggtttggaaatattcccccaaattgtgaatctgtctggatgatatgacgatgccttcttcgcattcccctgttaggtcttgggttcagcatgttgttttctgcttttgtgggtttgtttttgctattccggtgcccgtgcgaatatggtcggaaatatggcgctttatctgtgatgctcgtgggctatgtatgggctgtctcatttttctcggtgttcttcatgtcggatgcacaggtctcttttatatttttcatctttgggggtggtacgggaaacttgcacattgtgatttttatttaattttggatgtctgtttttactatatatctccatattgagatggggaggcgaacagaggctcaaaacggatgtttcttggatttggagatctttaattgttttcacttttttctcttattccaggtgagggttgactatagcttggttgatgtaagggttattggagtctgttctattttcaacggatctgggtttcgtttggatttgatttctaggcttcgctatggtctttatagggaagggaaaatactatgtccttgcatacctatctgtttctcgttgctcggtgtctggcccgacaaatgtacataggcacgttctataacgtgtctggcttcatgacatagtaatgaccccttctatattgggctaccagtcctagtaccaggattccattgttgcttctggactatgctgaagacgtatctagatgcttagaacaggcgatgaaccgtccacgggtgtattgacttattctcaataaagattggtattgatctcagaagtagcaataatctgaacataattaagcattagttgagggcacgcgaacaaaatcgtccttttttctcccggtccagcatcgaaaccaccccggcacttctcagtagcaagggtagcggtaacacggacctgacgggcatatatcgcagcacacaaaataaaatctgaaagatcttcttatatgtgcggtcccatccataatcataaacccccgaagatatacaaaaagaaagcaacaatgagatccacggcggttaacaatcagacagcgctattgttcaccgtcgtagtgtgcccgggggtatgttcaggggtctgaccatattccgcagcagcaggaacggtatgcacgatcttcctcttcgcagtgaaaagaccaacaacaccacgctcctggttagtccccagccagggcttgcgggcttcacttaagaccttctgagcgaggaagtagatgagctgaccgacaataatcagaacaaaggcaatcgggtacatccaatggatagagtagtggaagaccttgacgccaatgatcacaccccagaagttcatggtgagcatggagacgttgaagaaagccgccgatgaaagacggaacaacagcggagcgagacagtagaacaagctcagacacagggtgtagccggtgagatatccgccgaccttgccgttccagtgcgcattgtggaaggaggtccggtcgaagataccggcctgcacaccgttgatgatcattgcgaagaaggacatctgacccagcacctcgtacacaggccgagtgctgacgaagtactcctctcccgtattggtgagaccatagaagctcgcgcctaacagcgcgaacaggtcacccttcagttggttgccttgggatacgtttccgccgttggtaccggtgatgtggtccgaggcaatgaggatgcccatgccgccgatgcatattatgatacctgcaatttgggtgatgtggtagcgtacgcgcaggaacaggaatgagatgatgacgaccacgacgatggcccagaagttgatcaattgcgcgcttagcatggttgtgtattggtatgctaaaacaatgaagtagttgccttccacgtcacagaaagcaaggatgatgtctgcagtggttagtcggggttgtatatcgaatatgtggggagattggggacatacatttccagccgtcacgccataccagtcggagccagcccttgaagccgtaacggtacatcgtataaggagtgaaaatggcgttgagtagcacatagtttaggaaggtttggaacgcagggattgcccattgttcctggccgagtagcgttgtgaatgtacccgtcgaggtattggcaatagcgaggatttgactgcgagaaattgagttaggatttgagcgactggtagtttctgaagtgatactcaccctagagccaaggttatatagaattctttagtcttgaagtagccaaagaaccctttcttctggtcgactaggtccgcaggttgcacagcgcgctcagaggcatccgcctgggaactcgaactctgtgcgcccgcctgagcatccttggatagtgagcgggtagaagtatcacggtctacaccagatgcctggacggtgacttggtccttcgactcagacatggcgaattgatgcgtgctcagaaagcggggttgcgttttaatgatgcagatgacaaaccggttgcagtcgaagtattagagcaatagaaagggagctttataagattggaaaacgagcgcaaaactcccgaagtcgctcgtgtatcaatataccgtttggcgatgaatcggacgaagaagcagaaatctaaatgtaacccgaggcctaagaaaaaaaagcgtctggaacctttcctaatcgggccatctttgataagatccacactgttaaacacagccaatcaatgggaggatagtgggggcggtgagggtctgtgctgcggacattgccgtccacctggtcttttatgtcagcagcttttaggcaaggcgcctggttacttggccgatacttgaatagagaggctaattgtcggctttaggggaagtactttccatgtaccacatcccgtagcttgtggagatccatgcgttgagttgaccttgcagagaatatttatagatttatagattgatagatgaatcttaaattgtgttggattttgttttgtattgtacacaagggctaggactcagctgttataaatacatgtactcgatggccatcctccatggatgtatgtattgactgaccccattccgaaacccctgagaaagaacattgtagaatggattccagatccagcttctgccgatcacggaagaacaccagaaggacgaagataaggtacgtctagattttatcataagctgcattcctagtggtatagcatatttctgcctgtacataatgtacatacatagggagtcccaggtaactatatagtctgaggtggttataggtactttggataccttaggtacgccgtagagatgatagagatgaaatagcgataaacagggatcatatggaattctggaaggattgaaagttcccactttcacttcatatctctctaagaagcttcttcttaatctcccgaggttctttcaaggggaaaaaaaatccaaaaaagcccaagtacctgccgaggccgtcaggtggaccttcagaactgttcccgatcgtcatcccctccgcagactctttcatcattgggatctccacctccattccctctttgcgtccctttcaaacccttttcaaacaaactacacaatcctccgataaccttcttttaatttcattcttttcccccacaccgccctttggctctcctctcgcgccggtgcacttttatcaggcccggagtgacgagacgcctttccctattcctgccggaccatggcgctggaagtacagccgcccgacggtcgcaaacgagtgaaggtttatgaactaaaagataatgattggtttgaccggggaaccggcttctgcacgggtcagatcttgggggtgagttgtcgcgtgttgtgcgcgcactgaggctcttgcgacgatgtttcatcgcgcgcaatcccgagcgcatcatcatcatcatcagtaactgatcgctttgaactaggaggagcctcgcatattcgtcgaatctgaagacctacccaatcgtgtcctactcgaaacgcggatcaccaaggacgatggctatcaaaaacaacagggtacctatcccgtcattatcatctcatcgctgtttggtgtcttttttgactaactgtaccacgcgattcagagactttgattgtctggaccgagcagaatggcacggatatggcactgagtttccaagaggcggaaggttgtgcggtcatttggtaaggaatcgacgaaaaatctttgcgcgcatgaactaacctcatcaaagggactttgtcaatgctgtccaacagcatctcttaagtctcacttcagctggtaaggtttgtcgcgtgtttgaaagctggcagctctaattgttctccaagacgacgccttgtccgacgacctcgatagctaccagtccatcgtattacccggccccgaactcggaaatctccccgaaattgaacaaattgtacgagcagcgagcatgacacagaacggtcgagatgcgctatccaagtacatcattcgcgacgagtacatctccaaattggtaccgctagtgacaatggctgaggatttggagagcttgatcgatttgcaccgtttgtgcaacatcatgaaatctctaatcctgctcaatgacaacaccatcatcgaaaccgtcgtcgccgatcatatcatcctcggagtggttggggctctggaatgtatgctctacccagattcatcctggtccaagtccaatgcaattggatactaacgaaaatagatgaccctgaattccccacacataaggcaaaccatcgacaatacctcgcggacaaatcgagatataaggaagttgtcccgatcaaggacccgctcattcgccgcaagattcggagtacatggaggctgcagtacctaaaagatgtggtactggctcggatcttggacgacccgacattttcggtgctcaattctctcatattcttcaatcaaatggagatagtgaatcatatccaagcaaatgggcccttcctgcgtgatctatttcaggttttcgacccgagaaatccggaccagagacgcaaggatgatgccgtgcagtttcttcaccagtgtgctggcatcgcgaagaacttgcaggcgccgtcgcgggcccaattattcgccaactttattagccatgggttgttcgccgttatagcgtttgccgtcaagcacttgaatcccgctatgcgcacgactggcattgatatcttgtcggctctgttggatcacgatccagtcatgatgagaggttatatgctaaaggctgtcaatgagaaaaagacaccactcacagacaccttgatcgaccttcttcatgtggagactgaccttggcgtcaaaaaccaacttgctgatgctatcaaggttctccttgatcctcagattcctatgcaggacccgcttggtcgggctggacccgattacttcaaagttcgcaacaacaaccttctctctgatgcatttgtccagcaacattttgatgagtcgtcaaaacggcttttccaaccgcttaaacagcttgcaaatcgcacagcccgtaagtggttagatccttggttttgatgaagactttgctaaccttgagtctagttaatgatttgacattccaagaggtcaccctctactcgcatcttgttgatatcctcaccttcttcgtccgccagcatctcttccgcacacgtaactctatccagagtgaatcactcgcgcctcgtgtggcacaacttctgcgggcaccgcagaaacacctcaaactcggtgagtgtacagcccttttttttgacgcagaatccatagctaatacagacaagtcgccctcaaattcttccgcaccctgatcagtctccaagataccttctaccaagctctcatgacacacaataacacgtttgagttgattctcgacatcgtctacgagacaatgcctcgcgacaacctgctcaactcggcttgtcttgaactttttgagtttatcaagcgggaaaatatcaaaccttttattctccatgtggtcgaaaaatatcgcgagaaacttgagaacatcatttatgttgataccttccagagcctgattcttcgatatgaccagatgcaggggtacggagccgaggcggacgcgactctgttcagtcaggatgaaagcaccgctccgcggagaattcctctcaatggccagcgctggcagggtgctagggagatggaccccgcggaagaggattatttcaacacgtccgacgacgaagatgaggtaggtaccttttggattgagacagtttgagcaaacgactgaccatttaagataaagtggacacaggaccgtgtggccactgcggatgaaccttcaagcggatccgcctctgcggtcgtcaaaccattggttgactacccagatgacgacgatgaggacatcatggacaccaaacccgaaggtgcagaacaacagccagtggccagtcccaccgagatcactgaggttcctgcgtcatcactcacccaaacgccccctgcgccgccggagcgaattgcggagaagcgtcgccgcgaggaagaagacgatgatgagctcagcaagcttactgcgggacctaagcgaagaagttcaactagtggcaattctggcgcctttaacatgaatcggaaaaagaacctgtctgctggctcactggcagataagaatgcctcaccaggtgtattaaacaaggtcaccagcgccgcgcccaagagaatcgctatcaatattggatcaacggcaaaacctcccgtgtcagaaactgacaacccccgcacagaggtgacgagcgagagttacgagaaggagaatcgcgacgacagtcagggtaacgagggtggatgaatatacctcataagccaggcgtttttcttgaattaagtttccctttcaatggccttgataccagactcgattgcgggatttcccatattccatctcttgctgttctttgggcgatgccctttcttcttcttccgtttcttttcttcttttcttcggggtgctgcccatctgcttccctcctgattttacgaggttttgtcttctctggcctgaactagcgtctagttgaatgttgatgtacatggcatggcgtctgggcaatgcattggatctagccttgcggtgtctattctttttattttcctggtcggactcggaacccgacaattggcagagccctgcatctgcggatggagtcgttgcaatatatcctgctatcttcgtggtgttctttacctgttggaattttctgtagtgccgtaagcacggccttcgcagtatctgccctgccagctatcaaaatacctatacagcccagcaatatctctctgtgtgtttctttctttttctgactttctttatatatttttcgtatttttcgggtggtcgatcggctagcatggatggctctcgatgtagagtgcttggatccaccagccaaatccgacttcacctccctatcaatccaacgcaattcgttcatcaccccagggtaatcatatacgcgagaaatatacataacaaaggggtgcatttcgtgtaattccgtcccttcaattaacttatatgcatctggacaacaactaacccagcccaggccacccaaccaacccgtaaccatctataccctggatggaacctacatgggagagccctacagcagatccaatgatacaagctaaacaaaaaatggcacctggaattaccccaaacaccttcctcactaccacaggttctccatcagaccaaaagaagacaatcttcttcatctccggcaatccgggtctgatcggctactaccacccattcctctctttactctcaaactatctagatgaggaaaaagaggaaaatctaccaagcccaccgtcttttcaaatatacggctgctctctgggtggctttgaaatcgacgaacgccagtcctcgccatcaaacaatagcatcgatctggacctggaagatcagatctgctttgtccaggacaagctcactaccctgatgggggacgaaggcaacggcaacggtaatggtaatgccggaaccagacaaaaagtcatcctggtcggccactccgtcggcgcatatatcgccatggaaatcctaagacggcaccgtgaatcaaagccagaaagcgccttcgatatcatcggcggagcgatgctcttccctacagtcaaggatatcgccgcgtcgccttcagggcagaaattgacggtacataccatattcctcttgccagatgcttgtgttttgattcagtttcgtggctaatctcagctcgactgcatagactctactttcaatcattccccgtctggctgtagtggttagtctcttcgctcgactacttacattcctgctcccggcatcacttcttcgacctgttgtccggctcgttatgaacgacccgcccgttcatgctttggacactacgtgtggttttttgaagagtcggggtggggtacggcaggctttgtatgatattctctttttggctggtggtttgggttaatctaactaacttcttctcctggctagacatatggctgctgatgaaatgcggactatcacttcggacaaatggagtgatgatgtctggggtgctgcgtcggcgcgtgagcctatcgctaaactgtttttctattttggtcgtaatgatcactgggtggctgatcagacgagggatgatattgttgcggtgcgcgggcagaagggaggacaggctgggccgactatggttgtttgcgaagagggcttgccacatgcattttgtctgagtaagtggatttttattgactttgactacgatacgtagccttgctgatattttgtagaacacagtgatgtgatggcgcaaaaagttgcggggatgattaggcagattgtggcctgagggagaggctacggattttacgatgcatcgaaatagacaggagctatatgaagacaatgaatttcgccattggcgcagactgtaacgggtatctcaagagacgctacgccacgcccattcccatccgaatgacaaagagcccaaagctatttaaatatgccggaataaatcagaaagctagacgccatgtacaaatgcttgaggggcccgaaggaaacatccagcactcctctagtgcccttgtacattgctctgttgagctaatcctgccctccggaataagtctcctagcacatcggattgcggctggggcgggggagtaggagccggcatctgatgaggcaccatatgttgatagttaggctgctgctcggggcccagatggtgtgctcgcacactccaagcgtcgtcctgggcgcgctgctgaccaaacagatccttcagcgaaatctgacgtcccataggcacgctagcctgtatttcctccatcggggcagtctgtgaggaagccgccactgccgcgacgtgcaggctgttctggcgcatagcttcgaggcgcccgcgagctagcttcatgctctcccccgcatgggtggcgcactcacgaatcatctgggcgtttatggtgcgactctccgcggtggagtttggcggcggctccgagtagatccagagaccatagatgcgcacgttgttcgtgccggtctggttgttgggtacattctgcgggtgcaagggatcggcgatgccattctgtccggcttcaccttcactttcctcagctttgaggatcacatactcctctgtaatttcgacattctcgccatcggtgagggggagatcgaaattgttcaacccgcggcggttcagcacgaaggcagtgtagcgctcttggcctagatcaccttgtgtttcctggcagacaaataaggttccttcaaccccgttcttttcccattgttttgtggtggggctgaagatgtagaccactgcgtagggggcaagtgaaaggatggaggtcactgagggcttgtggcggcggataacagagaggttgagctcctcgttcgagcggagcgggggtgcaggctgttgctgcatgtcggagtagtatggggcgtcggattcataatcggtgagattgacaggattgtgattgttctgtctccgaggtttgcgtgaagtcatgttttctgtgggaacgcttggaaggtgtggaaggatggaaggagctgatatcgtcattgcagctccgccttcgcgcttatccggcgactctctactttctactctccgaccctcgaagctcttctcttctgaacctcatgtggggtacctgggacgctggcatatatttgattccttcacaattggtttcaacatattccctattccctatattctacgtgatgacgatacgacccttctaaaccttggtgggatgacctctgtgatgaaatgactgagccattgtcgcattatacaactgattctctcaattctctcaatttatcctatcataaccattatcctcttgttcttctattgcgacaaacccccaaagcctattttccgctgccggaattaaaaaccgcgcaagcgcacatacatacaccaccgctacaagctgctaccctaccgaaaccgcaaaccatagccaagcgaggcgaataaactttcttaccttctgacaccaccgtatactcgtacatcatgagctctaaatcgcaatcgccgtccgcatcagaccacaagggccacgagtccgaatacgcggaagaggttaagaacccaggactcgacgtttcgtctctttcgcgtgctgtcagagcaagaaaagatgaatacacgcgccggaaatctatccgagtcaaggtcgggacatggaatgtagccggcatctccggcaccgagaaagacgttggcaaatggtttgtccaaggagacggggtgtgcccgaagttctctgggacaaactacgcacacgcacgaaagccagaatccaaatcacccagcaagcatgatgagcagaaatcagacggtgacaaaaaacgaacctttcaccacagccccgaggagatagacctgtacgttttgggtttacaagaagtggtcgatatctcttctccaacagaagctctccggccatatgttgacttggcaccgtccaagcggtggaaggaagcagtccaaaaggcgctacctggaggatatcagctggtctctgaagtccagctggtcggcttgttgcttttgacatatgcgtcacctgccattggagatagtatttcttctgtctgtagtacatctgttggtaccggactgatggggtacatgggaaacaagggtgccgtgacaacgcgccttgtcctgggcgaaacgacccgtttggtctttatcaactgtcatcttgctgcagggtccgacaaaggcagcttggagcggcgcaactgggactcttctcagattgtccagcgtgctaaatttgacgcggtttggtccgacgttgatggatcgggagaatcgggcgaatcaataggagatgaagatttcactttctggtttggtgacctcaactaccgcctcgatgatatctctagtgatgatgtgcgccatgtcctcgctcggcatactgccaatgagtacgacaaagagcgccaagcaaagcagtcgtcaagccattctgaggactctacggccgattccaatgatgagaatgagtcgccttcttcttctcccccaaaagaaaaggagacggggccagacaccgaccctgtcactgatgatgagattgatcctcataatgaccctgcatctcttcagactacaatttcctcacttctcccgcacgatcaactaggagttcaacaaagaaaaggagcagctttccacaagggttggcgggaaggtgacatcactttcttgccgacgtacaaatatgatgttggaagtgtggccatgtttgatacgagtgagaagcaacggggccctagctggtgtgatcggattctgttccgcagtcttcaggataagctgagacatgagaagctcgaccaggaagcggaggaggcccgaaagagggatgaggagatgaaggcaagcgggctggacaaggctgttgccgatgataatgtcttgtttgaatatgaccctgatgcagacggtgcaaacagcgaggagtacatatcagacgaggagcaagccgctgatgaggatgctacgacagtcgcatcactggactcttcccatgatccaatccgcttggaccactatgtgtcgcaccaaggcattctttcgtcggaccacaagcccctagatgctgtcttcaccttgagttttgatgcggtcaatcgcgaactcaaagcgaaggttcatcaagaagtggcccgtgaattggacaaggccgagaatgaatctcggccggatcttactattgtggtggataagtatggtgaccaaaagcacacagacaaagacccggacaccgtcgatttcggcgatattgcctttgatgtgccagctcatcggtccctaaccgttgccaacaccagtggcacggcagccactttttcatttgcggagcggcatgaaggtgacgacgagggcactacacaaacaccttcgtggcttgttctgcacgtctccaagtctacagacaccgcccatgacactggccaagcgatgacttcttcgtctgggaaccacactttgctccctggggaagtagcaaatatagatgtcacggcttacgttcgtagcatcaggcacgtccgcttgctgaatattggaaagctcaaactagaagacatcctagtccttcacgttgatggcggccgcgaccattttatccccgttcacggccgttggctacccacctgttttggttgcagtgtcgacgagttgacacgcatgccagaagcgggtgctcgaagtttggccgaatcagacacccctcatccatcccgcacagatagttccactgaaatccgtctgtcggcaccccgcgagcttttccgactgactgaggcgatctcagagttgacagagcgcgccgtcgcggagtggagtatgacaaatggtgaatccgaggagcataaagccccatgggcaacggatacttccggtggagcatggcccttccagcctgatacatggactctaaaggacccacaggagcgtgctacgctgcaaatttccgtgcgtgaagcccttgacaccaacaagtccctcacttcaatatttgcccctgagacatcatctcttcatcgcttggaggtcctatctgaaaccctcctcactttcctcaacgcgctccaagacggcattgtcacggcgaaagtatggcaagacatggagcagcagataaccgcgcgcgagaagagcaaatcccctcctcgaaactgggaagaaacccaggcctgggtgcttgagcacctagcctactcaccagcgcacagcgtatcattcacatttgtcacttttatgctcgcccgcatcgccaatgaagtggccccggtatcgtccaatacacctttggtcccaatgtccaagcaaggaaagcccgttgtccccaacgagccgagagatgaacaggctgggactgtaagccagaatcgagctcaatctcctactccagcttccgctactgccttcataaccagtggcagtttccgccgcaagaaccgctcctcgagtacatccgctggcactagccctgactctactggtcagaatcagtcgatagcacgtcgacaagcagtcgagactgctctagcatctgcctttgcactcgtgcttatttctggctctgctccactgccgcctaaagagaaagagcgtcgtatatctgaagagcggaggcgatcaattattgaaccgttcttgaagatggttgcggtggatgatcgaggtccatccggaggtcggtcttgatttttttctgatacagtcgagagggttgcttnnnnnnnnnnnnnnnnnnnnnnnnnnnnnnnnnnnnnnnnnnnnnnnnnnnnnnnnnnnnnnnnnnnnnnnnnnnnnnnnnnnnnnnnnnnnnnnnnnnnagacttgactttcagttgttcgattgcatcgcgttgtctcgatatgtataatgctgtacaagtgccatattctcacgtttttcttgcctatgaggattaatgatacaggctaaaacaacctcatatttgaactaaactcagtattccatcttaaaacatgatagatcacgttacagaagtacttaagtccatacataaacgccaatatactcgtggaccgatcctgcggtcatcacccgacgcccatttcaaacagcttataggccactacatatcttcagtcggcaataaaatcgaaaaaatggtccatataggtcctcatcccataccatccccatccctgaccccagaccgccgctgcgagaccagcccaccaccctgccgatacccacccgatgacccagcccccgcagctccagctccagcgccagcgccagcgccagccttccccttcaacccagacctagactttgacctctgctgcggcgcaacctttcgccccatcagcatacgcctcgcagcatcccaacaacccgagaccgcacgcccaggcaaactaacaagcgacagcgcaatctgagcagggacaactatgcacgcgcaagcccagtccagcaggactagcgcgtaattcggacgccgggactcagccgcccgcttcgcagcagcagcgagcgcaatggcgtcaccggcctgcgtctcaagacgcacgaaacgctgatcagtctgcagagagaagagggcggatcgtttctcgtagcgccggactgcgcggttcagggcttcgatatcgggctggatagttttgcgggtttcgagggctgcactgacgactagggatggggatgtctggtcttgttcttttggggagaggagggggtctttatctgtttgggtggcgagacgggcggttgctgtttctgcgacgtgggtttcgagttcttcgaggcgttttgttaggtcttgtagggttgttgggggtattgggtctgttgaggatgatgcgatgcgttggaggtggagggtgcgtctttggattagtcttaggatgtgggcgattgggcggacttcggaggctaggaggaagattgttaggttgtagtttgatactaggccctctgagggtcgggagaggctggagcggatgccgtggaggagacaggtgccgattatggggaatatgaagcaggcggctagagcggtgagttcgtggatgtggagttcggagatggctgttgctgcttctttgttttggggttcttggtcgtctgggtcgaattggggattgtcgggcgctgggaatccactttcttctcgttggatggcctgggctgagcggtaccagtccctttgtgcagttaatattggtacttttattttgggagatcattgggggttatcgggggatatagggggacataccaaggcaaccggacagaccagttgaggaatatagcagccaagactagtaatgtgacgtcggtgacgaaggaactaccttcatggaagaaaattccggcaattgcaggcagcagggccagcccgagcggggcagaatgccaatgcgattcttcttcttcagttgagagtgtggcatggtcttttgctacgcgaggtagaaacaagtcgtcggtcgatgagcggatcgagttgcgggcctctgagatcgagtcggagagagtggagttccgtcgttgactgtcgaaggtataggcacgacgtggtttcaaggaaggtgaatcatccatgttgatgaaggttgggaaaggaatgtgttgtctgtctctattgctaccccgtgcagagagtatggggtaaccttggaacctttgccgaggatgatgcaataagaaccggttccatggttcgcagatcccaaactggtaattgtccactctatataacacatctatacacttcaactatattctatatttctatatctcacagttctcgaataatattatcacatatttcatatctttctctcctcgtctactaagctggattgaatatttggtgatatgaagtactcgagagagtggggccagtgaggattagactgtagccttgagtttcgggtcccgtcgttccagatctacattaagcttactgcctagaaagtcgttcaagtgcccatgcgatcaaaaacctccaaggttgcagacgaaattatcagactcgttcgacaacttgataagccgtgtgtaccgttagacatgactccagcagatgccaatgtggtcgattggcgggcatcgagcaatttctttacaatggacgccattactgatattggactgaatgctcctttagaatttctggactaagcggatgatatcactgtctctgaatctattgatggcgctagctatctcgaatgttatccagttatcgcgactgtctttatggtcaattaagagctatcccagtacttgtttggtcctacagatggtactagtcattttgcaagcggagtcgtcgcctgtcgactagctatggcaagctattagataaaggcaatgaatctgacggcattgtcgttcatcaagcccgccaacgcctcaaaagataacagagtggtgagaaactggagacatcttccaggctttaatggaatcgaaagaggatggccaaccatcttccatccggagagattgtcgtcgaaatttctattatatgtaagtagcacacgactctcgtagaccagctatacctaggtacagaatagcaggctaatcatccttgacagtgaacgccaggtccgtctccacggcaatcgcaatcaacaattcaatgttcctgctactcaagaacccggacaaactcctcaaactccgagaagagattgatggtgtaccggatgaggatgttatatagttactaaataaagggttatttaaaaactagggtatcagagcagtttgctagggaggaatactatagaaaatggcactcgtattaaaacctgactgctaggagtgactcttcctaattacctaggtaggttagatgactacctgaggtatgtatccatggatagtgtgtgtagactggaatgttgagggatatcctctccaaacttatcaactgcatcaactctctcccactcacacacctccgagaactagtcaatctgatcaatctgatcctcaatagactagaaagtctagatcaataataaactcattcattccatcgaaaatatgaggcggatgcaaatgaataaggtccccgcctcctcgggtctattgacacccaaatgcggactggtttgcctcacacgattcgctcaacctacactccacacctatgtgcttcgtatttctttattcatcttctttcatcttctttattttctttattgcaagtcgttgagtctaattcaatgctaatccaatggataggtttctctgtctgccgcaaaacatgtcaaggcctgatgtccccggcgggttttgtctctgcggcccatacattcttcgtgaatagcacccgacttcactcaaggcatgatgtcttgagctgtgaatcaacctcctgattctcactattcagatttcaataagacatcgtccctcaatcgtatcccctggccgggtatacatccttcagcgagggaggatggttttatcccatccttctttctttcatcctatctcttcgtttacttgagcagttcactgaagaattagagacgcagattaccgagatactcgttttaatctctgttttacatctgccgtcatggatattcaccaaagacaccctcaggccgtggctctgccaatcctgtcttctttctctattgctctcgccattccaccattaattctgcatggaaagaaccgcaacttccctgctaccagtctgatcttttggtcaatcctcctcaacttgttcaacatcaccaacgcccttatatggcccacggacaacgtggcgtcgtggtgggatggggctggcctctgtgatatcgaggtcaagtttatggctgccggctatgtgggcattccaggaagtctggcatgcatcttccgaagccttgcaattgtactggacacagaccgggccacattagtcccgagcaaaggtcaacgctggcgcaatcagttcatggagattctgttctgcgtggctgttccagtcattgcaatgatcacgcatatcgtctggcagaagagtcgatacctgctatttgccatctcgggatgtgtgaacaacttcgacgagagctgggtcagtctcgtctttgcatggatctggccgccgatcatctgcctcattgcagcatactattgctgtaagtatactcccaacttcctccataaaaaaagatacgaaaagcacaccaactgactaaaagttccaggcctggtcctcatccgcgtacacaagtacagaaacgacttcgcaaacatcctccgcgcttctagcagcaatctcagcaaatcccgcttcctccgcctcttcttcctcgccctatcaatgctcgtctgtatcctcccactccaaggctatgtcgtctacgccgacataatgctctccctcccctggcatccctactcctggagcaaaatccacaacggagaatggaataccatcgccaaagtccccatcgacggcaccgtcttcttcgaccgctggacccccgtcgcatcaggcttcatgatcttcatcttcttcggctttggccgcgacgcaacccgcatgtaccgcacagtcttctggtatctcggactgggctactgcttcccgagcatccagcccccaacagagacacacagcaccgcgcattccccggcgcacgcctcaacagcaaccaccctcgtcggcagcatcagctcccgtgccaaattgttgttctcgcgccagaaggaatccatcgccacttttgtgtcggcgcgtgctacatacaacgatcttgaaaagggcacctcttccaccttatcccgtcacagcgacggaaagtcgaccaagaagtctcgatggagtaacttgccctggtcgctctttaacagacgtcagacacgtcaggatgtcgatgggacactgctggatgatctccccggcggtacctcgcagactgtctgcacaaatgcttgggctagtcgccgtgatagtcgggacttgtccagtgggccgacttcaccggagcaaaatagagatttcattcatgtgcggcaggttattagccagcagagtgaggttagggctcaggtctagtgggcttgttcgttcttcggattgttccgaggattgcagtggcttattacggttcttctaatcttgcctttacgttagtctggggtcgtggggttctgctgtacacgaaagtagtaatactaagtaccataacacataatagggaggctcggcaaaatggaaatgaatgaatttgtttgaatctgtttctgcttggactgtatgttccatacacccagcttctgccatgcactcgtcccatccacccacacgcgggcatatcgcctgtctgctcctctcttatcacatctatggacgtctcttttgatttctggtacaaatcagacgaaatgcagtcagcggcttgggaaaaggcttaccgggccttatttggtctgttcgagcattacttctacaatgttcgctcgttgtgcttgacgatgcatatgcatatgccggcctgggaggaggtgagagggaggctaaacgatggcgggataaacgacattcataaaagtcacaggtagaattcagaaaagccagtgtttgagccaggaatcgagctttagcatacttagagtgtacgcgtactacacatgctaccaagatctcgactacaaaacgaagtgtattcagggtataatcgtacaatattatcacaccgcgaaggaggattcactcaacacagccccaaaatgaaagcaacaaattcaggttgatacagagccttaatcaaacaatttagtgagactcgtcagagtggccgccgttatcgggtcgcttaaggacctcgagagtgcctagaggagtgttagattgaattttggttttgtttccccctcttgtttccgcagagtgaaagcaaactgagaaaacgggaatcgacatacgctgcacaacgtttagagaggaccgggtctggccctcggaatcttcccaggtggccattttggcatcgccctcgacgtacaggagggttctatgtggacaaagttagcttatctgcattaatcccaggttcaagttactgcattgatgcaaatgggcagaggcaactgagcaaggcaattgtagggtaatcccataaccccaccccctactgctcaaggacgaacatgacagagtcatgtctcatccgaaggcgcctcgcttcatcgccaaatcacatggcctaagtccaaacatgcccacacgatcccattgcagacttcaagcgcgagcgcaagctctcgctctcgatccgcatagaccgcgcggacgtgccggacccaatcggcacgatatagcaacaaaacactcgcggacaagacgccattcaaacatgcagtactgtgtcgcatacaagccagaaatatatcaagggcagcgacttaccccttctgcaagccaaggacgaaatcgcgctgggagccctcggggacgaagttcgtgatgcgccaccagctcgtctggcggttatcgcgggggccgtgggatgtggcgatgttgtacttgacgatctcctggccggaggaggtggcatggagctcgggctctgcgccgaggcggcccgtgagggtcaagcgggcgatggagtgggcgggcgaggagctgaaggcgcgggcggcctggggggcattggtcatgcgcagggcagggcgcagagaggagaagaaggcagacatggttggatggaggatgttgaattattagattataaagtatagcaaggatgggttcatcgggatttgttttggcgtgttgatgtcgataacgacacgtgatctagggggttaccgctttcggatgtgatatgacatagacactacatccacctggggtatggatttatttaggctggctattactgtaactgtgactgtggctctattatgggttgagtcaaggatttggatgaaattgagacctccttgggaatggagttggtacagagtgctccgtagtcattttcgagctcataagctcatacccgatagctatagctttagctataacaagagcatttcacgtttccacgccacagataatacagtaaacccactggatatgttgttggcagccctcttgctctttcacaccatgctccttattgggaagcgtagtattgaccatcacctcattagaaacccaccttcaaaccagtcattccactctggttctccattggaactccaagctttccttgattttgtaagtgcccccaatcataagatgtcattgtcagtcttgcccgacttgtgctgcaggcaatcacttatgacgttggaaggccttgaaatatgtactccgtttaacttgaaatgaggtcggcctccgtttatgcttgcagcattaccttctttcttcctgtcgattattgcggccgatgcctacatatgtaggtgtaatcctagagaggaagtttcgttattctgattgatgcgcaatgtccggaagccctgttcaggtggatctccaggctcgcatcccataaattagtcatcgtacacgtgatccatgatacggcctcgtcagccctggagtgattctgggctgaccccgtaaaaggggcctgctaggatcaccctcgcagacactttcctgtccatacaatatatactccatactccgtactccataggtgcatatctactccgtacgggagcagacagctataggcgtcggaattataaatccagcgtctcccgttccgagtcgaaataaaaagcaaggaccgaaaaagtaaagtaatgcaaatcaaatgacgagcctcactctattattttgaagtcgtacgccatgtgaacgccaacacgaacacaccaggctatattcttttcagcctacaacaaatcatatcacaatccatcacatccgacagtcccgcaaagattgtacggagtaccgagtacgaagtactccgtccaagtgcacaattgtacaatgtgtacaaggccaggcacaccaaactggaaatggcagccgataggcagatcggctaggggtcagatcccagtggagatgccgcaatatcgctgattgagtgaaccggaccgaagataaattaagataactgttgtctcagatgtactccttgcattgtcaattagcggcccaaccacgtcgctgcggagggggcgtttgcgagtcaacaatgggctaacatgacgaagacggcctggacctgcaggtatctgcatgacaatggtgagattggtcaagtcaaaaggtcgaagttaaattcgtcaaaatcttcgccaaatttgtagaatcgatagatcgcctatgatagtcaaagcgcggcgccacccgtgagaactgagtctgctatttttctttcaccgcaatctgtggagatgaatatcaaggacggtgtgtagttaccatctaacagggatgaaatgacagctcacttgcatatgcaatgcgttgttcaacggcttaaagaagagaacacgaaaaaaaaaaaaaaaaaaaaaaacaaatcatccaacagagccatggttaatgacaaaaagataattcagccacaatatggagatggggagatcttctctctcttctctttggtccgtgtcggtgctggtcccagttgatcgaagatgattgctggctcgatcggcaatttcctcgatcggtggggacaaaagtagatagttcaggtacaatcgcgtttttaaatattttattgtcctcttagattcctcgctgcgtccatctttcgtgctaataaactcaaaatgtggttcttttctctcttttgttgtacgtgttttcgtttatatgtacggagtaggcttagggctagtcgttgctgtcttttctccccttaccctataatgtgtccctggcgccacgtcaattaattcttttctttttctattaattattaatattcgtgtattccctccgtctatattgatttcgcgcgcgaaccgtatgactaacagggatatgtgaaagacgtgctggtcttaccataaccaaggacgtttctctacggagaatcaattggatttcgcttaagtcaagatgcggtggtctttgctgttcaccttaatagtgtccctgttcctactggggacattggcagcgccgacttcaagcccgacacgacgcgatattggaggcgccaaccttgaagctagacaggaaaatgaaacggatcctacaacggagaatgctaccgaggctacaaccgcaagtcaaacagatgcatcaaaaacagctaccgatgcatctacagctaccgaagctacagcgacagatgctactgcctcgactaccagctcgaccgctgctacaaccaatgccacaaccaatgctacgacgacgacttctgctgcttctgctacctcgactgttccctcgctcgatggaacaactccctcttctcagcagcaaaccgcaaatccctctagaccaacctactctggcggcctgccaatcaaaccgacaatcacgccggcatggggtgttgggggatttatattaatagcactgggggctgttctgactttcattggtgtccgcaaacaatggtattcaatcttcgactcttggatgctaatatcttttgctaacaaaagaaaagggtccaaatcttcctctcgactgcattccttagcgctctgggagttaccgtgagttctatacctggaaagtagtaaagaacggaactaaccaatccccatacaggtcctcattatctatgtaatgagcccaccggtcagcaacgccgtgcagggtggctatctcgtcgccgccttcttcaccggcgctgtgttcggcggcctatcgctcgtcttcagagaaatctgcgagggactgggctgccttctgggcggtttctgtctgagcatgtggctcctttccttgaaatccggcggtcttctaaccgagggcgggcccaaggccggcatgatcattgcctttactgtgggattgtactccctatcattcagccactatacacggccctacgggctgatcggatgcacgtcgttcgccggtgcaactgccctggttcttgggatcgattgctacagcagagctggcctgaaagagttctggttatatatttggggtaagtctaactttttcttttgggttccatactgctcctagttgttgacgaacctaggattgaaccaaaacgccttcccccttcgaacggacacctatcccgttacacgcggtattcgtgttgagctagccgcgactattattattgctgttctcggggtgatctcccaggtcagactctggaatctcatcaaggagcgcagagccaaggaagaaaatgcccgccgggaacgcacccgaaagatcgaagaagaagatgccgaagtcggtcgccgcctcgaggagaagaacatccaagagcgcgctgaatgggaactcatttacggaaacggaaacggaaagcctgatagcaagactgtctcggtttcggagactgctgtcggtgactcccgacgggggtcggatgggttcgagtcatctgagaacggcaaggagggtgatatcgagctgaaggaaattccgagcccagatgcttctggcagcgaaaagaaccgtcagggtgaaaacgatgctcgtgaactcgaggctgtgccggaggaggattcatcccagcagggtcagtcacgggatgcagatgaggaaaagggcgccgagaaggagcgtcaatgtgaaggaaagaccccgagacctattacacctgttattactcatgtccttggtgagggcaatgatgactcctctgagcacggtgctgaaatcggctcggaggttggtacgccgcgctccaaacggttttctggcagagaaatgttgaaccggctctcttggcggaacagcaacggcgtggtgatagtttcacagtctcaggagaatctggtggctcatgatgatgccagttcttctgtacggggagttgtggatgatctccatgaggtgagcgttggttgtccgagtgttatctcggatgcggaggtccacgaccatgggcaaacgcaaaaagaaattaaggccgagctagctccagagaaggactctgcggatgcggaggttaagtcaaatgttggttcaccagacgtccaaaatgctggactccgtgtggatacggccacagcgcaaacagagaccgagaaagtgatcaccgaagaaaccactgtcagtcagcctattcaacaggtgtctcccgtcgagagcactgttattgccgacagtccgtttgagaattctggcatttccgaagtgtcagagaagccccaatcaccggaaacccccgcaacagatgttcaaggagaggaagtcaagtccacagctacattgcagccgtcacctttgaacgatactgaagggggaaaggtgaacgaggccaatgaagatctacctcctactactaaaaccgttaaatccgagtctatccctgaatcgaaagttgtatctttgcccgagcccaaggttgagccagagatcaaagtgctcaggaaactggatgcatcaaccgtgaaatgcatacctgagcaaacatcacgagtgattcactcgtaccgcacaaacgaatgggccaagcatctcgcagatgctgacactcctgagatggagccaattgagttcgaacccgaaccggaggcagaagactcagaagaagttcgcgagactgcagcatttgttgatgtaggcagtcttctccagacgcctcttaccgcacaaccaccaccaatcgtgaacagatctgaatttgatgatacggaaaatcaagaatctgcctacgtctcaccgttgccctcgccggatattccccgatccaagacgcggacaggcacccaaggtctcaccaatgcgaatccaactttaagccggaacaactcgacagtttcagtcaacatgcttcggtcatcttctggccctcttccaactcaggaaccggggttgccatcgatgcgcagcacgtcgactcccctgttgacaatcactactcccaacgagcccaaagaaacagtgccatcaccacgctggaacggaccacctcctctcctcgcagtccgccagaacatggtccgaaaccgcatgtcgtcgacatcagaccgcttcgatccctgggccgcacggaacatatcccgccaatccctacctgaaatggcgcacctcgtctccccaatttcaccaccgctctccatccccgaagaaacggacacagaacatgaacaagcccaacccaacgacgacgacattccactttccaagcggcgtgcactgctacaacgccagactgtgcagtccccatctgcattaacactggacaacctcgaggctgcccaattccctggatacttccagccagctcccgccgagctgaaccggtctgcatcaagaatggcagcatggcgacaatcggtccgcgaagatatcacccaaaaaagagatcctttggccatccagtcccagcctctcagcccggtcagtccccccgaccagcggcgcagtacatggaactctgtgcagcagatgcgcgacgcctcgtctattcagctgggcgatgccattgcagacggcatgcagcgtggcaacatgacggatctacaccgtcaggcaatgcggcggatgcaggcttcggcgaatcgaaagctgtagtgcccaaggatggcccattgattttactcgataccctttgctttgtgtgtttttgttgttattacataccatggcgaatgtgcctttcccacgactttatgaagtatctattgcatccatgtctataacctctatttgataatgtatatttttatatttttatacttttacccagtgcctacacaagctccatgcagcaagtaagacggctatcccgagcacagccgagacctggactgaaatgaaatgcagttcgtcattgtacaataaagcaatagtacgtctattagcgtttgctagaggcatactatacccaataaaagccgagatgaaacaagggacggtggattaatcacagtgaaactggggggcaaacggctcgcatatatattattggattggatgtatccctttcgagtctctgttgatataagatgtaaggtcctttttcaccagtttcctattcctgttgaatatttagaatgtcgagattatatacgccaagcaagcttctataaggatttatcaggatttcatctcgaatttcgccaattcaaatccaacgtctttcttttcccctaattcttttctaattctatttcttacactcgtttattgcatgtcctccacatagggcactttttccttggccgatctccccatctccgctttctcccccatctcctttctcccctcaaaacggcgtccttaaaattccccagacctctaagggaggaagaaacacactgttacccacaacaattcctaacggggccatcaaccaatcgcgcccccgtggagtcaactccgtcgtttgttcgcgcccagcggcgacagtgcgtcccgatctctggcccgccgtcgcttctccgcccaccagcagtccggctcgcaaacccagtcaactacgtcccacgaataaccccaataaccgtccgcccgcaccaatccgacgaaagcctcccactaggcttcggccactcacgcgacgcccatcccctcctcagcgtcccagagcgacgccgcagccgcctaaccccatccccgagcagcctactcgtcgagcgcagccagggggaaacagaaagtggccggactagcattgccctaccgcgacgacaccgccgcagcgaagaattcaacgaaatggccgccgcgttcgcgggcagcgcagcgcgcgatacggagaacctgcgtcctcccgaagctgtccacctcacgcaaaacggcactcgtcagaatgatcgcccccgccacgcccagtcacagacttccctccgctcccagtctcagattgcctccgttccctcgcataccggtcagccgcaggcggatgttgcggaggagcttgcttggggcccggctcatccttgcttcccgcatgttaatccccatgtgcctgtcgggtcgagggagcatatgacaacgcgggtgattcgcatccggcgcgactggatgattaagggtgatttggcgccgacgttttcgaatctgtatcctgagattctggatccattgttgtcggagcaggagttccgtcgggtgatttctaccgtcaatgatggtattatcaaggcgtttgatccgttcagttttcggaattggttcgatggcgcggtggggttgttgactggttgggtatgggatgatctcaatggtcccgcgacgaaaagccagctgcagcatgttgaggcctggttggagaattggaatcgtgaggtcggtgctaaggatggtgttcatatctggagcttgagacggacggcgtacatgtcgcttgatatccagattcccgatccaaaggttggcatcgtacccagtgaggcaccttcggctcctaataccaggccgagtactggtattggggctgggtcttgatggggtctgtcgggctggagtacgccgttttgcttttgctttctgattgttacatctttctgatttgttcccttcctgggacctctgcatgatatccatcccgcggcagattttttttttgacaatctttccttatataccttcgtctttggaggttcttttaatctttttgtgatctaatatctttcttttacatttcttctgtcagctttgtctacatatccctcttgatcctaggggctactttaccctgatttcttattgtcatcttcactatgccttcgtgtccatatctggctgtaacactgcattctcatagacttgctaccattctggaaaagaattacatcgtggcttttctttctctcttcaatactcacattgctaaatcaacacgcttatcacgctaaccacatacggcttagagcctctggagggagcctctggagcctcatcgtccgtccatttacactttcacgtattctcaacttcccctgtgcatacatgcacttgcgaaattgatttcatctacttccccgtaatggcgctgaggattgattgggtaccttttcttatatcatacgtttcaaatcggttctctttttatacaatattagtattactatattatccatggatactagtattccacacgacggcaatcgggggtaggcttccgtataacctatagaatagctttcttgagtcagtgttccttcggtcacaaaaccccagctagctttagaatagcgaaactgatgcctcatgctatcacagtgaaatccttgaaacttcacgagtgtagtacgatctttaacatcggatattttgcaactcggacccatcgccctgctcccagggatgttcctgctccaccgataggatcagcttttcatgcgcagcactccggggcgtaatctgtagcttgaattgcaccggatggctgataaccccaggctggaattctggttttacatccacctcagcaccgtcttccacgggtttgctgattttaaacaccgacagggactttgcaacactgagccatactgtgttgtctgccaaaatccggcctgggcagacacgacgcccaaagccgaatacgaaggtgtgcgggtcgagttctgggtctcggccatcaatctccagaaaacggtctggcttgaaggccatcggatcgtggtacagcgcggggtcatgcatcatgcccctattgtgcaggttagaatattgatcctataaacgagaccatggaaggccgattcatcgcacatggcaactcaccaaatattcggcataagtatagaacctttgggaatataatatccatcgtacatgtcgtcggtcgtcgacatatgtgggatccccatcggcagtgcagggtgccaacggaagacctcctttaccactgcattaacataaggcatgcgatcacgatctgctatcgtgggaagttgaccagggccgatcacccggtcaatttcatcctgtgcattatgttgcacatccgggttcaatgccatggcgaggaaaaacgtcccaactgaagacacggtctattacatgtcagcggcagtatcagttataaggacgcaggggagtatcatacagtgtcggcgcccgcgccataaagcgatgctgttgtccacctagcaaccagttcctcctctgatccagaagatggaatcccatttaacctaaatatatcggagaggaatgatggctcgtactttccatcttctgtccgctgctgaacaagtgcgtaaggctttttcgcgacatcctcaaggttctttctatattcctgcgcggttcgcttgaaaccagcgcccggaaaccaggcagggacgtatttcactattggaatcagcttttatggtaaacagataagagggaaaatggtaaagcgcaacttacatgccggtatcaaatctacaagccaagtacctggtgttgaagcaattgagaattgctcaagggcctcgttggcaaggttcaccagtagatcttggttgtgcggctcaaccctatagccataggctatcctgagaataaccgctccggcctcactgcttaatcatgttattatctatatcctttttttggggcactgggagtattgggggaatcactgacgtctggatgtgctccgtgagttttccttggtctttcaaaacacgccacagaaagcgatcggtttccacctcttgcagccgagcatactgtgagatggccagctctgaaccaaaatatggttttagaagcttccgatatgctttaaaccgttgggtgtatggttgcatagataacgcatggccccaaccaaccctgttaagctgttaatataagctccaatagtctatttgttctagacttaaaattggaaagggatttgtgaaattacatttcagatgcgaaaaccatatgcggtcgtgacgagtacagagaggcgcgtttgcgtaacagctctgacgctgtccgtgtatcattaaggattacgagcgtctgtcccatcaccgtaacggaactgatgggccctacaggcgccttttcatattagcaacaagaaaagcaagacaacagtcaaccgtagcttcttgagcctaccatataggtctttgtgctttagccaatgcatccaatcttgcacacctggaggcggcaggtcggcgatgttacccacgattggcttaggctgtgggcctgggggcagtggccctagaggtgttttgcgtctcatccatatcctcgcgataagaaaagcgagtagtcccagtatagcgctcaagagtgccttgaacgacatgttgacaggccacaaaatgtaagtgtggtaatcggagaaagaaaaatgaaagtcctaatcgcacttgagtacgggcccacttgtggctgctttactcatattactccgtagtctctggtgcttttagccttctgcatcacgcggcgctcatgcaccccaaggctgtactttcgctgaggaccccgccgttcaatgctcgctgaacgaaccacaagcctccaatatctgctatgcatccccgaaaggcctcgaccccttttcgaaggccgtgaggcgaacggatctggtaccgtcaaaaaataacgctagaccgcatttacccctgacgaatatgacagcttagcgaaagcaaacttatgggggcaatgatctgcgaagatgtcaacaaataaatgctcaatcatcggttttttcccccttcggctataagaccagctgacgctagagtagcaagatactccacatgcattcgatgtcatggcagcccttgcccaggtgaagggtaagactccataaaagacgcttacggattccaaagccggttgccccaggcgtttttattggttggctttgcttgacccacccgtggtgaaccaaggggacggcaatgcagaaacatggtggggcctctgatccttctgtgttggcgatggtcgcgcatgccgcagctggccatgtgggagccacacggctgggacgcattgttgatgtcatggtcaggacgcatctatagagtattgcctcttgaaaggtcgaggtttattggtattcattatgttgtatgcgcccacttggacttttctacaacctgtgctaaattttctaccctaatcagcgctcatatcatgtttgctttctggaggatgggttaggcgcatgccttctgcgattacatgccagttatattaccacttacgaggatatcacctcgtggaagttcgtcataattggacccgatactatggcacatgcacatgccaatatagtgcatcgaatgactggggcgcacgcttgttcagttgctacatagtgtgatcaatgctaagactagtgttgataggttgcgctcgagagccccacttctgcacggacttcactggacaagaggcctagcgtggcatggagagagtctttggcttttcttccgatccacagacccttgttgtatatacaacatagtctgagaactcggctccaattgctattggcgatttctccagttctggtgaactatttctgagcccctatatcctacctgcatctcatctgtgacttttcaaagcaaaccctcaagcgggcttggtcaagttggtgcctggagtacaattcacgggatttgttaggtgtgaacacgagaaccagaaccccgaggtccggtcaaaatcctggaattaaatctaggcactcttagcgtatgtgccaagaaacggggctttcgtgtattccaagtagtgccagagaaggatcacggcattcgtctcaccatttacgagtacgaggttcacccagatgtaacttagccccatgagtctggacatatcttccgtgctccaatcttaacacttacattttcccggccgcgccactacacgctggacctacagatcattatgcgatcccaatcccaaatttcggagtacgttgctttctcagtccggagtatatattattctatactgacaccaatcagaaacaagggttctattggacataacgtgcccatacttagcgtgtcgcttgaaaccgagaatggctccagagaactgaagcgagaaaacggcgatataagcatgaattttcgatacaaagtgacatatcacggtgtcgatactatcaattctaccactgccggtcctcttactttctgcactagtgtcttccatgacgaattgaattatcaattagatcgacgggttcagagtggcagcgaacagtggattccctgtagatatagtggttattgtcccggttttgtgaatgatcaaccttctaagattcatgttgctcaaagtgaaggcttcgtatgtctctatccaggtgaaagctgggaagggtcattcaccttggatgatgagctctgggagttcccagatcatctcagaactggggcgatcttccgatttgtattcaagggcgcaacgattgagtggtgggattggggcactaaagctgggacccatgctgatactgtcgtgactttcaggggatatggtcgaagtacgaggtcggactttacagatgataataatggtggcagacctcaaatatttgttccctcttccagcgagatagagctagttctcgcagattaaaccgctattattgttatgtctctgggaatacatatgtaaataaatattgctatgaatctttttccagcagaaacgaaagccaaaaaaaccccagggatcgtaaaatagcataattgaaacttgagactcattcaacaagggctccctttcccctgatagagaatgagttctgccattagtacgtctccaagtaatataccaaagcatcgcctggccaatggaaaatgcgagataatccacagctggccatccgatctgccgataccattccacaagagaatcaaagaacgcggggatgcggctcgatggccacaggacccgaaagaaccatgatgcaccaagaagaacgaagacaacagcttgagtggcaagtgtgcgaacactcaaacaaaacgattccccttgtaaactgtgacgagtttgaatgatagatgatgcaatgattgaaaatgtcaggccgggaacctgttaagatttaccctgctaccctgcgagtatggcattcacccaaagtttcaatagagtgaaatagcccacttcaagatttgaaagtacaatccattgcagttcaagttgacccttttcatgcctcaggcggtgtcgatccaaccccacccctgtttccgcagctctccaactccaatccccaggaacaactcgactcacccacaacaatatgctctcggggatcctcatattcaatcaaaagggcgaaaacctcatttttcgtgccttccgcagcgattgtcgtccgcgcctggccgacatcttccgcattcaagtcatctccaatccccaggtgcgctcgccgatcctgaccttgggctcgacgacctttagccatgtgaagcatgagaacatttacttggtagctgtgaccaagagcaatgcaaatgccgcgctggttttcgagttcctctaccggctggtcatgctgggcaagagctatttcgggaagctcgacgaggaggcagtgaagaataacttcgtcctgatttacgaactactcgacggtgagacatggaaaaggaccaatggcctagaagcagaccctaacaattgatacagaaatcctcgacttcggatacccccagaacaccgatccagataccctgaaaatgtacattaccaccgaaggcgtcaaatccgccatcgccaactccccaaccgactcctcccgaatcacccaacaagcaacaggcgcgatctcctggcgccgctccgacataaaataccgcaaaaacgaagccttcgtcgacgtaatcgaagacgtcaacctcctgatgtccgcaacaggcaccgtcctccgcgccgacgtcaacggccagatcgtcatgcgcgcctatctatccggcacacccgaatgcaaattcggcctaaacgaccgtctcctcctcgacaccggcgagtcctccagcaacatgaacaacccgggcggcggcaacggactcagcacgtcaaagaccacgcgcgccgcggcaggctccgtcacgctggaagactgccagttccaccagtgcgtgaaactgggccggtttgacgcagaccgcatcatctccttcgtgccgccggacggcgagttcgagctgatgcgctaccgcgccaccgagaacgtcaatctgcccttcaaggtgcatccgattgtgcgcgagatcggtaccacaaaggtcgaatatagcgtcgctatcaaggcgaattatagctccaagctcttcgctacgaatgtcgttattcgcatccccacgccgcttaatacggccaagactacggagcgcacgagccagggtcgcgccaagtacgaacccgagcagaataatattgtctggaagattgcgcgcttctcagggcagtcggagtatgtgcttaatgctgaggcgacgcttacgactatgacgcatcagaaggcttggagtcggccgccgttgagtctttcgtttagtttgcttatgtttacctcttctggtttactggtgcgttatcttaaggtctttgagaagagtaactatagctctgtcaaatgggtgcgttacatgactcgcgccgggagctatgagattcggtatgtgttctatctttcgcgttggctatggattttttttattttatttttcgctgactcaattgtttcattcagattctgatcgttcctaaaattctgaggtgattttggttgggagagaatcccaacgagcagtgttgatatcaatggacttgagtccggtttcatcttgtcatttttactttgcgcagcacaattggtgtctggcgttggatggacatatacatggatttttcacaagtatccaattctgcatttcccgtaccttgaataaatgcttgtatgcaggtttgaggttgtataatagcatgtttcactcagctgtaggtgtatctagccccttgtggtatccatggggctagataaaagtttggctctaccaactgacccttgggaagagagctggagagaaaacaataacatacgatgagacgaatgtaacactacatagccactatcttgaagttggagtaatagacaatggaaaataagtcatgttggtagtagtatgtagatagtagtacaattggaacaaacgacagatgtggaagagtaagtgacacaataagaacagtatatgagcaggaaaacaagaagcatattcacatagcccgagtagaacggaactcacaacaccaaaaagcagaaacaatttgtgctggtcaagaaaaccgaaacgaaaatgaacagtctcacaaagacaagaaggtatgataatacaggggtgtttgacaaagaaatcaagccaagtcaggccaataggaacagggtcagtcacaggatacaggtacagagatcatataatacattaataaaagacggtaataattgcaatagcaatgttcaacaccgacgcggacgcaggccaacacgaccctcactaaggagggacagccacctggacccgacatggctgcgacccatttggcgcgcgcactcgtcccattcttgttgggagaggcggaatttctcgaggaccagctcgagaagacgctcgtcttcttcggcggtccagtcttgtggagccgaagggatatgttcatctgttacctcgatggagggcagaggcgtgtctgggtcgggtgagccagctgggatgtcatagtccacgcggcgacgaggcggagatggaggagattgggtgacaggaggagaatgtagagagtaaaagtctgtagaggaaaggccgagaggcatattgtagggaatgtgacggcggcgcttgggagtcgcgaagcggttgcgccgacctatttccgcgtcgctgtcatcgtcgtcgaggatgtcgcggcggcgcttgtttgcgccgcgggcgggtgcggatggagggggagggggtgtgagagcggcagttctgggtggtggtgtttgtctgggagagacgggtcggacggtcttgtgtgatcgtggcgagcgacggggtgtgttgaaggggatggggctctggagacgttgggatttcactgatcgcgatgaaggtgtgggcgatctgttgaggagagattgtagtgcgcgacaggtgccgaggagaccgttgcccgatggaaatcctgtgtcggatgggggaggcgctgaaaataggcgactaggggtgaagcgagacgaccggcgcacatcgcatgggagggcggatggaagtagcatagttgtagatataaatttaatgcgcgacttgagtggtttgaagttggtttgaagatgaatggtatcaaagagagagagagtcaaccagttgttgcgcgggcgcgcgatttgtgggtaggctgtgttgcgccggaggcggtttcgatgcgcgacgagggagttggggatgcgaaaacgaatgaattaacttgtcgttgaaatgcgcttcgatttccaccttttccgggtgatgcgacagcgtggtgatataaaagagttttggcagcgagtgtgtaggggagaagaagttggaggggaaatgcgataaaagaaaattggggccgcaaacgggtgatcgtgcaacgtcaagtttatttccggtcacaaagaatgtgtttctattaatgaatttcaggttcaaggttcttttttgatgaaacagttcaaagacttgaaacagttggaaacaattaaaaaaagaagggatttgagagagatatctcaagggtcaacgaaagtgagagtgatgataggaaatactagatagggaacaggaatgcctttctattatactcgaactactgagtacttgatgaacttgcaactatagaccagtgaaacagtatactaaggagtctaggataagagggactatatgcaaggcgcatacaaagagagccctggagagggcaacaggcacgaggcacccctgagacactttttttcaattacatttcctattcgggcaacagccctgaagatcccctgcactcgagtttctttgaatttcaatgtatccggagtagtagatctggattggattgtattgcaatggaattagagcctgtaacgtcaatggcgtcgggctgcataggcatcaaagcgcagccctgttagacgcgctaggtcatacctagctacgatattctttgatttcctgatctccatcttcgccactgggggaagtcgcgttttaataatgatttgaaagagggtgaagttcccttcctactgttctcctacccttcttctacccttcaccagcccaggagatgtgttccctgccataccagccctctagggctctaggactatagcaccttcaaacactgctacttgtatgaacctactcttagaccttgtagatatcttcgtgaaatggtactccgtagaatggtggctttcaaaaattccaacgcgttaacgcgtctcgcgttttcgcgtcacgcgacgtgccgcgccaagactcttggggcacacatgccctaacaacgtattgtatggacgacactacggagtataccaatggagtacagtatgtatgtgaataaagagtactgcagtgctgctcgtgggtcaatgcttagaatgccatgtgcccaataggatcaaccaggctcatcccaccgggggattttctatactgtactgtaagaaactctgaccacccttgcttccccttacagggtcactcaggccaactcgtgcaaagatacggcttgcattatcttgcagagctctgcatctaccacactgtggggtgcagactggctgcacactacgggccgacaagtcctctacaggtctataacacatagactcattgctccactcattacagagtactacgatgtacatacagttggtaaatgatattccattcgtgtcaattgaaaaagggtggctgctccttcgaacccagcttaactagaagggctagcagggccactattcaaacggccctagtcctatctacaataccgagtggagagccttcggagtactctaagcctccattccaagacccgtgctcccagccacagatcaaaatccaatctcatgcaaggggtagcccgaggatgaaactgctcccaccaagaatcattaattatcacaaggttaggcttctgggacttaggacacagagaggcaagtcatcaataacacaacgcaataaacacaaaacctagaatggatgaaagttttccaatttccagggttctctcctactaggtaccgagatatctacggatgctatctaagcttctcctgcagtggcggtaatgcaagacataagccccttcccacggtccctaatgtcgatcatacctccacattcttctgatctgttcgtgccctaatgtggctgggagtctacttgcccctccaggcccccgccttggagcttataggacaagatacaaggtttcacaggttcaccttgatggcctcatcgtctcagacatagctcaatatagatcccttggtagttctcttgccccatcactctctccctgtcttactttctggcccaacatgtgtgcttcccctggcgatcattcctctagattcccggtcttgttaccccatacactatcgcttttcttttcttttttggttgcgaatagacaccattgcgcagcagaccggatgatgtgtctcggtgtaggggctgtgtagataggtaccggaacccttgtaaaagagggcctatagaattagaattctaattcatgtaccaagcttttctagcatatccatagcaatgaaagaagaggcctgcctcacaacactcgagtctaccacacttgcaaaccgaggccatctacttcgtgtcatgtgcacttccccatcgctcaaccactcattggcctgaaagtgagaccatctctccagttttgctcccgatcagcactccctatctctgtattgagctcccctcctccccctcttctgttatccccctgctctactttcacagtcacacgataaggacccgctatcctttttggtggctactaaccctacccgagacacagggataagaacaaagaggctaccaaaatagaagtgggctcactacactggaccctggcctcttactgcccaatggtcagtggaagcccctctatccttgtctggtggtcctagtaagcgctattgttgccttcgtgcgccccctcctgtccctctgtgggtcgtggcccgtatgtgcccgaaggaccaagaactatcgcctgcgtaacttgcttcctagggatggccattcagtggcgattaagtgacgtttcgttctgctgaggatcatcgccagtgacactggtcttattagctcccaaacctttgatactgtttgatgcttgcttggaaatagggaactcctgggcttattgctgcgtaagcaatagcgaggaagagaaatagattctaaacatgagtaatattttccttgccccgtggcaagcccagagccaatgtctacttagaaatataatattcacggcgatagtcacgccgccaaaacttcaatgcttaaagggtatacaaacaaaacctcattgaccctgcattctcttgaaacgctcctctgcagctctcgctctgcgctctctctccagtcgcatcttcatctccggcgtcatgcctctagtctcctcatctctcctttcggccgcagacttctcaacagcgcctacagtacgaccgccggatttagtcgttctcggctgcgctgccttctcggcctcttcgcgtttcagacgatccaagctagccttgcgccgggcggcttcttcctcctcggcggttttgcgttctttctcagctcggctttcggcctcggctttagagaccgctgacggaaccttggctgcttcccagtcccattgtgactcgccaagctcgtggcgggcaatgcggaaggcgtcgcgcgtggctcggtcgccggtgagttcgaatggggttctgccttcgttgttggttgccgttgggtcagaccgggcttttgtgaggagggccgtgactacggctggtgcattgagatttgctgcaaggtggagcggggtggggcagcggaagttttgtggcgagtcggcaggcgtaaaggtgaaagaagaaggtatggagttgtttgagatataggacatgagggcgggaacctttgagcggcgaatgagtgcctgcagttgggatgtgtgcaacaacgcagcttcctcttcttttgagagtttcggtttctgtggttgcggttttgggacaggggtagatggttttgattcctgctctcgccgcttggcttcagccgcagccagtgcggcttcatccacctcgctgaccttcattcgggtcaactctttgaaggaccgcatgagctccccttgagtcgcacggcgagtattgaaggggaaaccccgtagtcgggggtcgttctgtctgaggacctgtccgtcatattgaccgaaaagagtctttcgatttgtctttcccgtggctcggacgaacaacagctcggctgtatcaatcattcctttccaatccgacaaaacctctctgatatccttctcaagtgcagcctcgttgtaccgacgcaaacttgaacctgctgaatgggcagcaccccgtgacgcatcactggcagactgcgaaccaccctgctttcgccgcgtcgtgtatcggtggaacgttttgtgcgcaatgactcgagcctgtctgtcttcaactcctccttgctttcggtggatctctggtgctagcgaaaccaacatagccgcaaagtggccaccgccgatcatgcacatgaaaatgtgcgggccagaagcagcggggtcttgcacgttgcttgccttgttggtgcgcgccttgataggcgccagctgcttccgtcgtagagtatcaactaggtgagcgggttcgtcctgctcctcatttgagaaaatagccctgtatacacctagggacttgtttgatggcaatcccgagctagacagccagaatatgggatgcttcggagtgatcggtgtctcggtcatttccggatcctcgttcgggtgagacagcttggcctgctttttcagcagggtggacagcgctgtgctcgcggcctcctctgaatcctcctcctctgtctccgaggactcagaaccggatatagactcatctagctctccgattgcctttgcaaactcgatttcctccagcggcgcattcccgcgcagctgggctttgatgttataccggtgatggtccgaacggacatggctgcgttgttcctgtacactgttgtaagacaccctgcagagggagcataggttggacgttgcgatcgcggagtcctgtgccgctagttcgaggtctttcgaagagggttcggggtcttgttcggcgataggttggcttgtggtcttggccgttaggctagcaagaagttctggcggcagatcgtaaactggaaagatcagcggattgaatcaaagacgatatggggtttcggaggcgtaccatatagaggccttttcaagagctcctccatctgagtcgtgtcgaccatgatgggctgggcgaagaatgtgtattgagatcgtggtgcccctccaatgacgctgataagtgggctcttaccgcctaagagcaatgccgggtagttatgtggactttatgagcttcgtcgcgttaactatgtctatgctgtagatgctgaatttgcaatgcttttgagtcatattatgaaactttactcagccccttttgcgtcctcgagaatgttctttttcctgtgagtaattccaagcttgctgtgccacaacgagtcggcctcccgattaggaaattacacccatccactcctgtattcttggtatgcattgcatttcacgtattagcgcatcatcctaacaagtactcctttctctagccatccttcaagtatctacgttgtttacgccttttgcctttcaagtaactgtcgtaatcacgtgactggagagcaagaggcaacattatgacgtatcttttacacttgccctaacttcaatgttgtttattcttcttttccttgcgatgttagtaaaagataacggctaattgggcgtcttgggctggttgcgcatcccgatggtttgaatcaaagatagtgattagattgaatacttttaaagtcagaagtaatactacagtatgtgtacagtatgtgtacaatatgcgaaggatggttcatatagacatgaagactggccactaatctgaggtcatgaatacttgcattgcttggatatatttatatgatatctacatcgtatgttatacaactatttactttatttgccttccagtatgcagcttccagtgtttcgggagatagcctaaacggagacctcaagatgcatggtgggatgcaaatccaagttgaagagttgacgaagttatgttataggcacaaaaccaatggtgaatatcagcaatacctaagaatggatcctaggcaggttgtcgtaaccaccatgtcgctagccaatgtctcgtcggtaagtgccccaagaagcttcaatttgcgggagccagaagtcttggtaggtaatcagctggtcctctacccacaaacgccaacgaccaatctggaggcccgtagatttcgggtcatatggtgtagtgagtctcgcgtaagaagggtcgatctccaaaatggctcttcctgcaattcctggctcctgactcgatgcctgccgagtcgtacgtgtataacccagaacgatgccaatgccaccagaaccgggaacaatgcttgttatcttttgcgcgagctcctggacacgcctttgatatctgagagtggtggaaattccaaagttttgtctatcccaatcagtcgtgaatggtgtgaggacgaagactttgggtgcgtaaattgcattcaagacaccggggttctggtcagtcccgatcaaaccagttacactttgtgcatattctgttccatctcggagggaattgaacgcatttatcgtgaacgagttgtcatcagttggattggaaccatgatcaacgaatacggggttttcccagatatgagcaatgtacacacctttctcggatactacgagcacagccgtgcatccgtatacaccctttacccctatagctgagggaatagatgatggatattcaaaccattgggcagacactggtccaagctggttaatccaaattggcgccaagctctggacataattgttgtaaaggggagaagcgtcccggaaggcacacccaatcaataaactgatcattctctcgtcttggctgctagagagactcgtcttgggggcaaactgcgttggacttgcgactccactccttattgcaatttcatggctcttagtcgattgaatagtggtgataccctctgagatcaatgcacaatgctcaattgtggccatcactccgatgttggcgctgcccagagggcctatgctcacgcagcttggcttttggtaagtatcagaaggacatagtatttgatatcacttgttgaggtgaagctggaaactgtggttgttgattctgtgacggagtatccaatagtggtagcagtagctgtgggtgacaaggctgttgtgggaacagtgggattgtagagaattaatggtattgcttttgatattcgaacagtgtagcttccccgttcaatatctttggttctgatagaagaattggtgggcgagagactttgtacgggtaaaggggcaaggtgtgcttctgtgtcattgatacccaaagaggtaagtatgtgatggtgactaggctatcacattgaaagagctgtgcgcagcgctgctgaagacaatgacaacaaagcttgtttgcttgggcttagatacaataagattgtggacattgctaaacatcacctcctatcactaaaatccgataaacttttgcatttggtttatagtcagctcggtctttcttttggtaaagagtaagccgttaaattcaggaatggaaggtctctattttatagtcctgtcttcctagtaagattttggtccaaaggatgaggtcgattaaggagtaaagtaagactcaggttattcagagtgaaagaatggttaacgaattaatgtgtcgtttctcaaggcatgtaagtactccaattaactcatgattggcttttctcacacttgatctgtgagtacacattttcaaatgcgtttatataggctatcacatgactggcatcgcaaggcccatgcgtctctttggcatcaatctctcaactttggcaaaactcaatatataggagaccagagtctatcatcgctttgggcaacatgtcttcacaacagcagcgtcaacagcagctaatgcttgatgcacgccgccatcaaatacaaattatggctgctaagcaacaagcaaacgccagaagcagtaacaacaacaacaagggcactccttcgcggcagcaaatgcagcctcagtcacggacaatgggatctaaatatgatgatctgcccatactggagcccgctgatgctgtcttcatcagtgaaaatcccgggtcggttggtctagttcccgccttcttcgtgccctttgaatccgcctgccagcacggcccgctctccatcattcagtgcatcgtgtcatctaataatctgacgcctgcttttcttcaccatggtcttacacgtgccctacgctctggcaatattgaggttgctcattatctcctcgatcgtggctctcccattgttcgcgaaactccaagcaatatcttctgcgtacctttggaacgacaaattgccctctttgagcttcttacccagtatggatggactcccaacaccccaggttactatggtagtactcttctccctcggactgtcaagagcccccctcttcttcgttggtttctcgaccatggggccaatcccaaccttggcgtgcagaaaaccacccatgacaggtttggtggaccagatacttcatcgtgtgctgcactcgaggcagctgcaattcatggaggggttgagtcggtgtgtatgcttttagacgcaggtgctaagattcaaaacggcgtaccactacactatgctgcaggggtttgtcctcccggtacgaatccacatgctgggcatgtagtcccaagccgggaattcgataccagcaggattccagtaatggagctactggttgctcgtggggctgatgttaatcagaaagaagagtcccgacacatggtcgcacagtacgcgattgtgtatgcagtcatggcaggagcagttgagcgggttaagtggttgttagagcatgaggcagatccatataaaataggaagctggggtagtgcagccgagtatgcacatacctcggggaatgaagagatatcaaaggtcattggggaatttgctaaaggcaatgattgatgtctaaaagtatagcccataccaagaaatatatattgtgctatcccggttcggaaatttgttacttgtggcatataaaggatacggatttttttacgttattactagtatataaataaataaacgatgaacacatccatgttgaccagcattataaacggctctcgaagccatcaagccttctccagacttcccaagttgaaatccaacgccgataagaaatagccgcatcggtcttagtgcgcttatccccgaggattacatcatttcggatcacgtgaaaatgtcttggaaaattcgtattcggacatgaggtgagtcaggaagacatacctacctaggtacataggctgttaattcatgttacgcaagtctcatgcaagaactccagacaaccctgcctccatgtgtacaagtacagtgtaattaattaattagcctgacttcgaatacgaatgagtatggtaagcagccccgacttcgggaatttccccgtaaagtggagctgcccgttcttgcttttgtcagcagcctagcttgcaccaacaccccattctttcctcgtggtacttctccaacgttgtatcttttcttgcctgtgcacagaaaggcatactgggacgaagtcactaagaaaaatgctggatggccaatcccaggtggtcctggaggcgtcccgcccggggcacctcttacattcccttggatcggcgcttgattcccggcgacagcctttctgcacagatagcgagggctggggccctctcagctcatcgagattcgatctgacgccatgcttccttgacgtgattgtggctgtagtagctgtctggggtacactgagcggactgggcgccttgtggttgttactgaggaagcggattccgcagcccgtatcgaagaattggcacttctataccaagttggttagtacatgccgggcacccccgcgcaccttcgcacctccttggacgtcattgataatgtactgactactggtattttgttcataggctgttctcgccgctctcatcgttgttaccgcccttcaagctgcgatccaggtcgaatcagaccccaaaagcttctgggccgattttcgcttctgggcttccatcctgacaattgtttcgctgggggtgataacctcagtgcaatatttggaacattggcggagtagacagcccaatggggttgtcctattttactggcttttcttcatcatcgcctacgccgtcaaactccggtccctggtcgcgcgcaaggaatatatcggccgacttccttactttgtctgtttcaatatcagcttgggactagcactctttgaatttatgctagaatatttcgtgcccaagaagcaaagcgcctacgatgcgctcggagacgaggacgagtgtccctacaattatgctgatgttttctcggttctcactttcagttggatgactccgatgatgaaatatggatacaaaaactacttgacccaggacgacctctggaacctccgcagacgcgataccacccgggtcacgggcaatgccctacaggaggcgtgggatgaacagctcgaaaaggcaaagccatctctgtggacagcgctcttcaaggctttcggtgcaccctatgtgcgtggtgcgataatcaaattcggaagcgatatccttgcatttgtgcaaccgcaacttctacgacttctcattgccttcattcactcgtatggaagcccggacccgcagcctgtcatcaggggtgtcgtcatcgccttgtcaatgtttgttgtttctgtctgccagacaagtttcctccatcaatatttccagcgtgcttttgacactggcatgagagtcaaatcagccttgactgctatgatttatgccaagtcgctgaaactatcaaacgaagggcgctcggcaaagacgacaggtgatattgtcaatcacatggcggttgaccagcagcgcgttgcagatctgacccagttcggcactcagctaatctctgcgcctttccaaatcaccctgtgtatgctctccctttaccaacttcttggaccgagcatgtttgctggtatcggagtcatgattttcatgattcctttgaacggtgtcattgctcgaatgatgaagaagttgcagatcatccaaatgaagaacaaggattcgaggacccgattgatgactgagattctgaacaatatcaagagcatcaagctctacgcctggaacacggctttcatgaacaaactcagccatatcagaaatgatctcgagctgaacacgctccgcaaaattggcgccactcaatccattgccaacttcacctggcagtctacccctttcctcgtgtcctgctccacattcactgtcttcgtgttgacgaatgataaacctttgactactgagattgtgttccctgctttgacgctgttcaatttgctcacattcccgctttctatcttgcctatggtgattacagccgttattgaatcttctgtggcggtgacgcgattaatagagtatctaaccgcagaggagctgcagactgatgctgttgtcctccaagatcccgtggcgcaaatcggtgacgagtctgtccgtgtccgcgatgcctcgttcacttggaatcgtcatagcggggagactgtgctggaaaacatcgatctcagtgcacgcaaaggagagctcagctgtattgttggacgggttggcgctggaaaatcttctctcctacagtcattgctgggtgacctgtggaagaaccagggagaggtgattgtacgtggtcgaatcgcgtatgtcgcccaagcgccgtgggttatgaatgccagtgtccgagaaaacattgtctttggacaccgatgggacccatcattctatgatctcaccgttgaggcctgtgctttactcgacgactttaagaacttgcccgatggtgatcagaccgaagtcggagaacgtggcatttccctttcaggaggacaaaaggcacggttgacactcgccagagctgtgtatgctcgtgccgatatctatctcttggacgacattctctctgcggtcgatcagcatgttggacgtcacatcatcaatagagtactcggcaaaactggcctcctcagtggcaagaccagaattcttgcaacaaacgcaatcactgtactaaaggaggctgactttatcggcctgctgcgggacaagaccatcatcgagaaaggaacctatgaacaactgatggccatgaagggggagatttcgaatctcgttcgctctacgacagttgactcggacgatgagggtactgggagtggctcagatgacctagctagccccgacagctcagtcacaaccaccatcgttcaggacggtggtacatcggacagcgacgaggcggaacaacttggtgatcttattcccatcaagggaggagctggcgaggcccgtagacggacaagtaccgtcaccttgcgccgtgcaagcactgtgagctggcaaggtccccggcgcaagctgggagatgaggagaacgtcctcaagagcaagcagacccaagaagtcgcagagcaaggcaaggtgaaatggggtgtttacggtcaatacgcaaaggatagcaatatcgtggcagtcattgtttacttgcttgccttggtggcttctcagaccgctcaagtggtgggcaacttctggttgaagcgctggactgactggaacgaagcccatggaagcaatgctaaggttggaaagttcattggtgtctacttggcgcttggcctgggatcatccctcttggtcattgtgcagaacttgatcctgtggattttctgctctatcgaagcatcccgaaagcttcacgagcggatggcatttgctatcttccgctcccccatgagcttctttgaaaccacaccatctggccgcatcctcaaccgtttctctagcgacatttatcgagtcgatgaggtacttgctcgcactttcaatatgttgttcgcaaactctgcccgtgcggtgttcaccatgattgtcattgcgtcagccaccccgtacttcttgctattcgtcgttcctttgggttatatctaccttagctaccagaaatactacctgagtacctcacgggagttgaaacgtctggacagtgtcactcgaagcccaatctacgctcacttccaggaatctctgggcggtatctccaccatccgtgcctaccgacaggagaatcgattcgcccttgagaatgaatggcgcatggatgctaacctccgggcttacttcccatccatcagcgccaaccgctggcttgccgttcgactcgagttcattggttcaatcatcattcttgcatccgcgggacttgcaattatggccgttgcgactggcactgagatttcacccggcacggttggtttggccatgtcatatgctctgcagattacgcagtctctgaactggattgtccgccagactgtcgaggtggagaccaacatcgtgtcagttgagcgagttctcgagtacgctaatctcccgagtgaggcacccgacgtgatcttcaaacgtcgccctgccatcggctggccggctcaaggtgccgtggagttcaataactacagcacccgttatcgccctgggcttgaccttgtgctcaaggatgttagtctcaatatcaagcctaaggagaagatcggtgttgttggccgaacaggcgccggaaagagttcgctcacgctggctctcttccggattatcgagggcgtcgaaggaaacatcaggtaagaacataccactattacctttcgtctctgttctccaggctaacaaacatttagtattgatgggctcgatgtgtctacaatcgggttgactgatcttcgtggacgtcttgctatcatccctcaagatcccgctatgttcgaaggcactttgcgcgacaacttggatcctcgtcatgtgcacgatgacaccgagctttggagcgttataggttggtttcacttagatccatttaccgcggcgcccagtgactgacggtttgcaataaacagatcatgcgagattgaaggaccatgtctcgaggatggacggacaactggatgctcagattcaagaagggggtaagtgactatctgcgtctacatacagcctaaggcatcctgtcccctgacacattattgcaggctccaacttgagtcaaggccagcgccagctagtctctctcgcccgcgctcttttgactcctagtaatatccttgttctggacgaggcaacggtaagatagttctgtctctactttttggatgatagtttcagctaaccatggcgacaggctgcagttgacgtggagacagatgcgctgctgcagcgcaccctgcgcagcagcatcttctccgatcggacaattatcacgatcgcgcaccgcatcaacacaatcatcgattcagatcggattgtcgttctggacaaggggcgagtggctgaattcgacacgcctgcagagctgatcaagagcggcggcaaattctacgagcttgccaaggaggccggccttctcgacagcgacggtggcattatttcctcgcaatagccgtgaaaattcaatcgcttgcagcggcctcgaatccccgcatttcctgttcatggcaaaagagatcactcagccagcccacccgagttgaacaccgtccatgcagctctgagtggctcggggaagccgggttttcttttctttttggtacctcgggccgatcctaagaggtcccagatgctctttgctgcttgcatgggtcatgttgacagcagatccttcctgaccgttcaaatgtaactttgcggtgctgaatgtggcgccagtgtctgtgcatatatgcatgtacatgtactgaagaaaagtttttcattgcacagttcaggggacccccctgacagggatggacataaacggtgggagagtggctaaatggttgaatgtctgccttgatttcttttctttctttttaatatgctgccccgagccttgtttcatgttggagatggtttacctcgatgtatgaggacatccgattggattttgaccctgcgaactaaaagataaaagtgattccctttcgtacattaccttccttctttttggacattttgatcaaattgtggccgtgcactacatgtttatatgtggataacctgaagactaccgacatcattgtctagactcaagtgaacagctgaacaacgtaattgtacatcaaactaaacgaacagacagcattcccagactagaatcatcgtttacgatgattatctgcagtagtgtcttgtactaaacgtggcggtgacatcttgatatcccagagtaattcattgtagcggtgaaaggttggccacctgtccatcgtctactcggaggccttcgggtaaatataacaaattgtaagctctactccgtacttatctgtatgttgcagttattccgcgaggacatgaagctaagattgtcatcttcgacataataaaaccatgtacataggccctcctccacatggtttcccccttctctctggttcgacgatcacatcctgagaatatatctccggcaagaaaaaaatagatatgccaatttcaaacaggtatacgacactcctgcataacctccttactgcctgcaaaacagactctccacgcggttggaattatagtacatgcatgtatggagtaaattgttcaaataaggaacgactgtttcattgaagtacctggtacagttgtctgaaatatctcaacctgaaatatgttgtatatatatttcccgatgccaaaggtgttgagaggggcaaaaaggaggggcaatgacaagaagtggatttcgactttgatttgcacgtcagatgtttaatctacttccactgttaacaatttcgaaacacaagggatatcatctacaacatacgtatagggtgtctttctcgcgtctaaatctaacgatcgcatggcattaccttccatccttttcccattcatagaatctgattggctgtggacctgcgttcaggatatgtttcagctatccagatcccaggcaagggatgtggatgacctcaaaacacggctgcacgactgatctcgaatgtggacaccggaatcttgttcgatgggccatgtcttgatgaaccaaccagagagacagcaatcttgatcttgagatcgcgaactccccagggttgtgcacgtcgacaaaagaggcaatgttcacagaagtagatcgatctcgcacggactgcgatcagggtttcccggatagtaactcgactcgggggaagaatttgtgctttccaagcgaattcgtttcaatttgtcttgctactttcgctggatttgtgtgcccatgcactgtcaaactacgaatttatccactttctcctttcgtccaaagccgcctccactcgaaatggtaactgtcttcacaccgaacaaagaccggacgtcatccccgcttcccaggtcgatcgtacatagtatggagtccagtgtgcatcagtggctggctatttgggagctggttgtgcgaccagcctacggaatttgatcccgtctctgtatagagtgctccataatgacggtctgtcttctgcactatccactatgcacgctaccggcgcatcagcccagctccagtcctacacatacgatggtaggtctctgcaaactggaagtcttttccaggaacgtcatgaacccacaaggcgttggtttgtctagtacctgttccatcttcccctctctggacgcgaacagatttcattttgattattttatacttcctaaaaagaccagcggcctgaactatctgcataatagtcaaccgtataataatatatattccaagaaacatctgaattgtcgagactcaatcgggatctggaacgcctgcaagccttcgatcgactcagccctgagggggaagagcgaagccagccacggtgggaacatacccacaagcaccaccgcacaccgcgacaatcccatgcaatgcacaatgcacctatctttgccttagagtaccaatgtggcgggactgaaggatcgcttctcccgtagccaaacactaaaacccgcctcgcacaacaggaagtgtagaattagagccatggtgatcgaaatgaggggaatacggggaataccagacctagattcgaaactttgatacttagaactcaaaatctcttcaggatgtcccacttgattagctctacggatggaacggaagggtaattccttgcattaaacgattcggaaatgagcgaatcccggtggaatagaagtggcaccttcatgcccgtaatcgagtttcctgttggagagctacataatccacgacagacgcagaaagcccacagtcagcacagtagttggtaataatggcatgcaccttaattatggggcgaatggagatgctgggatgtatttgtcactgtctgccccgcagcgcataatttttccccagccactgactcgcgtggaaaccgggcgctcccggggggttgaagagagccacaaaaagccctatggtcggggatcagtggaaattgaacggtcttgttcgttggtcagtcgggctccagttttcttttcaccacattggatccccgaaagataaataaaggcgatgatccttcaaagtctatacggtgacatccgttccagcctcaccactcgatcgggaccagacacagatatccaggggcgatcttgcgggtgctgcttcgggaaatttgtccgtctttgcaggtgacggggatgcaaatggtccactgggtcaatggttacgatgattgtattggtccgcggatcggggataagcggacactagagactagactggcgggttagtgggttgctgggaacgcgatatatcttgtcggatgggaaaagtgggagtggaacgaaaaaaggagtaaggctgtgctgtaaacgtgatcgcgagtaatgggttccgctatggtggattcgttaggaagctttggggattaagagtggcccggggaagagtttacagttccttagcagagtttgcactatcaacgtaaaggaactaggtagtgccagtgcacggaagaatagggcaatgattggctgtgggtgaaagttgaacacaaagtatgatgcaaggacctctatgggaaaattccgatggattggacagataagccacttccccattcgcgccatccaggtatcagggattctgtgatctcccaaggtcgtcgagaggtgaggacccccccacttcccgctgttggatatggtaactttttcgtgaaccaaggaactggataagtttatagagtttcaatccaaagctacggttcaaactatcaaagcatcctgatccttcatagatatttttctcttgggttttctccccttacatgtatcgtatactatatgcaggtgatttccacgttccgccactgaggcgacctaagtaattttccgctgcaagggtgcctcctgcctcctgactatcacagggctacggagaatggagtaagcgaaagcgagtccgggcgaaggatggaccgtaaaatggaccgaggacaatgcattgaagaaaattcagccaatccgatccgactgactaggtacaaagtacaaattgtgcgtaggagctttggactttgcaccgtcaccaaccgagattgctcctaccacatatagactagattgactaggtcgagacgacagtctcaggggttaacgtagagaatctcggtagttgtaggtataccaaagtacatggttgcaattgtattctatctgcaacacattgggcgaccaacaatagattaaatgcagtagtgctgccccgacctgtagggacactatgggcggcccttcgggccgtgccacaatggagaaataatttcctactgtttcatattgctttttgcttggttctaatgtattcatctattgcaagcagcaggaacagaaagtttgcatatccatttggaatgcattaagcattattgaaagccaccacaggatgcatatttgaaatgctttcttcgcttacaataggataggcgatgatattccaaggctggaatgaacgctcattgcgattggctgtccgaagaaaagtgatgctatgatcaacagtactatcactagggcacatgagaatcggacttttgtttacgccagatgtaagccgatgtcttggaatgtcaaataccttcgcatctggtaaggcattgcttcctgaaacctctagcttgaagctacttaacgtggcaattaaattcaaatctcaaatctgcatcaattccaacctgtcgggtagagtcaaaaggccctatgatcctcaactttgacctttcccttgggatagtggagaacacgctagactctatatggagtttgacaggtttagttttaccggcccgccatccccgacccgccaggaagtggggtcgagtcgggtcgggtctgggccccagggtccaagcgagattggacttgggaggggatgatccacttctaaaagagtcatcgtcgattactggccaacgtcaaaagtactagcgtaaatgtcactgtccttctgaccatgaacttctcctgccaatcttacacctaaaagataccgaatttgagcctggaaagtactctctacgggtcccggcttcggcctcaaaacaccccgagaaatagtcgacgctggttgacgcaatgctagcctctttcggttcgatcctgctcgatcgatgtgcatcattgaacgatcgtgcgtgcggtggctcggatttgcccaacaatctgcactagtcatgtgcacttttttttggtcccgaagatccaaatagagtgccggtttgataggctgtggcgtttctataatacgaggagaatacgatcctctagcgaatgcagctacatatctcttgcctaactaggaaacatcctcagctctccatctgtcatgcgagcgggttgcctctctcaacggtatttttgtagcacaccgatcatgcagtctcgaaaccaccatctctatccacgatgatactctgcgaactgactcacactctgtatacactaccacccccctttccatatatttacccctccttcaaaccgcttagttctatttcgattgacataagctccagatggactgttggatcatccagttctggaacggactatagacatcaagtagttctaagacgaaaaacatccttccagaggttcttttgtatattcctgattacttccgtagcggtgaaccaacctaaagagccatcccagtccttgtaattagcccaggaccttttctccaacgttccagaaatgtgcgacgggcacagacatgaagttgtttggaagtgtaaaccacattcccatccccgaccccgatcgtctgattgttgcagttatctcaaaactctggcccccacccagtttattttcttcccgtcagtgcacacccgctgtcacatatccgccgagtccgccacgcctcattttgaggtttcagggtgattgcatcaccgaacaagtccgctttagctcacctttttaatggtagggtaagcggtagtggcggtcactatattaatagttggcgctgataaaatgtttgctctgaaactagtgtgataaggattggcaacgccaagctttcaaacttcctgacgtttgtcttgggctttcgaaattttctgaattaaagaccagcagggaacatccatgaacgagtctttgccgtgccttaagtaactgctgaattttgcctcttcagctgtcatgtccctgtggcagtgcttgaaatcgcctgagccacgcgactgagccacgttgtggctggtcctagcgtttggggagggatcgccttttgtaccaatgagaagctttcgttggcgattgtcaaatgttaccctgatgatctctgatacgtttaataaaaggggggttctagaatctagaccaagccattcaaattgaattggaaatatggagtaacggagtattcaatatggtactccgcagtccgtactccgtatattcggagtaatccgtgattccaaatgcaactaggacttttgtttatttatttagttatttattttttaaactatctgactctcacctgactctctcatagagtggttcacggagtagagcagtcctgatccccacgctaaaacaaaccacagcggctaaatgggcaaagcaaacaagccgacccagtaggaagatgtaacgggggcacaaacaaagagagactatccggggatgtcagtgctgaagccgtagttgttttagttacttagtattggggtatgcctagttttgcgattttgcctcaaagaatgacaaataacgtacggagtacctaccgttgccctaaaactgtttagttcgacgacactgcttctttgttgtacgtgtgccttgcggtaacctaaaaaatatgatttgcctacattgcctcggaggctactacatccaatttgcaacaggctctgcagttactattgctgtatggaatagactgctcggcaattggaatgttacattgttatgtactccgtatgtcggtaggcagtagtctacttcgatgagactaatcagatagatacaatactcaaagtacacaattagattggggttgtttgtgcattaaaaaaaacaaggaaaaatctgcctcttgcatcttccccgatatagcgtggatggatagtgggaccgaagaagtatttccgcatgtattccccttttgtcatgtcaagatagtatagagatagtaggtgggtagtgttttagatcctcctcccccctttttgggtagcattgaccgaattgggccgttacgaagcatctcctttgttccggagttaaagaccgatagtgtaaattgtatggcgtttatatccccccaaaaaacgccagtgtaatccaccgggacgggagatggacgcgttgacagagtcctgggtacggagtttcctttcccctggactctcagcacagacgcaggcggggggaagggaagacggctgattgggctgtcacaaaaagggcccaacgtcaaaaagtaccgccactaacccgccgtgggatagttcctcgaaccattttgctaccaattttcttccccgaagcgagagtagagagtagatcatgccgtcgtgttgggatgccaaacactctattatctcgatctgtcttagagcggtttttgaatttgttatagcccatctttcgcgggtaaaccggcgtaggcgagacctacggtcgtattagcacgtactttttgattcccctttcgcttctactgaaatgatttgatttggattgatttggcgagattgagatgtgagggtctgatctcagggggcttttttttgggctatgctatactcagctgaagccaaggtctattccagaaacccgaagtttttggccaccccggagttaggtatctgtcaatgaaccgagatcgacaacagcaacaagctccagacggggataaaaaagaaacagtgacagtttatcggcgagtcacctcccaggatccgggatgttgggccatgcacaagcgggattttgataggttcacgtagaatggggaaatgtggattcatttgctagtgtcggggcactttgctgagatccgaagatcgaaagaaaaaaatgttacagataatatttaattttcacatttaagtagtaagtaacttggaatataatatgataatgttatagtgtcataatgtaaaaaaaaaagaattaggataatataggcatcattatacacttttgctatgtacttttcttagattcacagcatcgatggcgaattatatttttcaaccggaaccaccgaaaggtcgatctgcacattaagaatagcacacggcttcaaataggcctgtgcgccttcccagtattttgggggtgcctggcagctagacgcgagtgcttatacgagtgcttatagggttaataggttcgtgtttatgattgacatttatattgttaggtcttggtggttgcctcgtatgccaatagtaagtgattccaagacttagggatctgatccccctaagggtgcctttgtacctttgtatctttgacctgacagcaagccatgagcctggttgtggggggtcgatcgataatgagcgccactgttggggtttgccccgacttgaaattaatggaattaatatggaatttaataaataaaatacgtagaataaaaataaaaatttaatataattaaaataattaaaaaataaaacaaaataaaataaaaaataaaaaatatgcgatctacaaatagtgggacagggatgctggatcgggacccccaaagctactgcatctactgcactttgaatgcgccaatctcgctgcacgcatacgatcacagagggattccggcttctaggatcatccatgctctgttgctggccacttttttatcgtgcttttgtcattgtacgcattaaagtctagaactgaaaaaggcttgcatatccccttcttgttcctcttgattttctatactccctcagctctatttaaaagatcatcccacttgatcatcttctttcaagatatttcattctcaaccgtcccaacccccggtgccatctttcgtttacttgggaacacaaagtggaggcttcctttcgttcctgcatcccggttacgaacagttactgtgctgcagttatccgcttcacatccccattgagccacctgcacattgtgaactccaactgtgtgagtacatcccgcctattctggctctgtttgcaagagcttgattggatcccggtttgtcggaatgccagcgtttgtcctaccggttcccgcaccggagcgggaatggccattccgccgttgggtgttcatgagaataccctcttccggggacggactggtgctgccgaagatgcttggtggcagttggctgactgcaagtccacagcattagtaccaacttcttccgaatcgcaatcccgccactcgagcaacactatctataaagagaacagtctctcctagacgtgcaatatccagatcccacatcactctcattcctggttatcttgatacactgcttcaactgagcctgaattacccttatcgaggcgatttcattccaagttcctatacgcatctatatccgccaccatggtttacagtaaaccaacaagcggagccatgaagaggtctgcctcggctctcgaaggacccccaggatggggcgatgttcctgtatgtttccaagagaaatctgggttccttcttactgacatctggtttagccaatgatgaccaactcccgctcatcattccgtcctccttatgctcactttgctatgatttaccttgaccgtgatggcaagcttaaggttgatgaatcatcttctattcaagaacaaaactccactgtgttcactccagaggttcgccagaacttcctcgagattctgggtgaacgcattggctatcatgctcctgttcgccgtatgtcaaagttctaaacaccaaggtcaacacatactaatcccaatatagagacaatggacgcatctcctcgtcgggtaagacgtcgcaagggcaacgctcctgctatctctatcgacgaccgcctgaacgagcaggataccgatagcgaggagctccctagcgggtctaccgacatggttcctctccgcattggagactctcaaaaggtcatggcatactatgagggtgcactgaagcacttccaacagctgaactgccgtatggttgctaaagcattcattaaattcatcgagcctcgcaagcaggtccgacacccttacaatggtggcaagccaccggcaggatccgcccccggtactaccggggacccagaaaagactaagcccgagtggtggcctcccggtgttatgcataaggagcctgaccacctgagaaaagagtgtatgatctagctcctatggtctaatttattctcgatctgattgcttacttattctactagaccgcattgagctcttgcttcacattatccgcaagctcggttcttacggtatcactgccgacaagctcaaggatgttgctggcgacaccaagcggagcttgaagcacccatcccacgtcgagatcatctacgagatcctacgagttcgcaagatggaggagcgttttgaacgaggtgaagtcgacggcaacatggtcgtttacactatgaaccgcggccctagccctaagggcgatgaagaagacgactccaccacctcctcagtgaccatcgaagagcccgaacacatcaaccaaggattaatgacccccatctcatcattcgagcaagcatccacctccttgaccacacctatcgacaacgtgccatcagcccgctccctcccaggcagcttctccatgagtgagcctatcaacttcgaaaaccgccaggaccgccattactacaccacacctccccagtacagcgattcattctcgcagcccatgctcagcactcccgtaacagcagagatgatcagtccccacgacgtctcagtctcagccttcgactactccgctcacaacaccttccaaaactccacacccgatcactcacgcgcgggagtaagtggtcagtacgatacctggaccccatctttccgccagaacatcttcagccctgtcgattacaccacacctgcctctagccagggtatgccccagccttcaatgccctaccagatgcccatggtaccacacatgcaagacatgtcccatgctcagcagtcccacatggactccatccaccaaagatccctgcctttccgcacgggatcattgagccacccacatcctaacgggatgactctttcccacgccgtctgaatgactaatagggtgtggtgctcttgtcacggatgattctgactcgtgaaatgggtattaacgaacatatatgagtgatgactctagtccacaaacttagcgcttatcataaggctttgccaggggagttgttgtctttttgggtatattggtataaaacttggggtcatcttgaaaggtgacggaacaaatggggtctttttcttctttttctgaaaatacttgggtcttgtttggtttgaagtgatgtttattccggtctttgtttttattctgtggtatctttctttgattttctttatggtctcaccgtttttcatcttcttattttacttggtgttggccttgtgcttttcttcttgtcttctgttgacctgcttacctgcttgatcttttggttttcgttgtgaatatgggttttctccaacttggatgtttggagctgttgataaacgagatttgggtagatacttcaaaattttattctcaataatatacaaccggttctccttcgatggtttcctttttagctcatgatacttgctatgggatgggctattatctagctatgtagtaactacccaatcctcagtcaagagacttacacgcagggtatctgtcacagacttgaatggcgtgcgtagtcggtagctcgtttgtcgaccataggaaccaatggatattaaaccaattcgacaataaaaatcgtccgtttaagtggcctctgtccttgccatgatatcttataatactacgttctctttttgtacctacttattccaagccggacctttggactactttttcggtcttatatatgcctttgtcgctctgtctctattctgaactttgattcctgaacacttctacctacctaggtatcgcaatatggttagtgatattgtatttattacattatactaaatcctgagattcaaggtctcctgccgctccatgtgtttgcaacatctgccctaaatttcaacgtatgtatagatcgcgagaggcaccgatggatgaattgctatttgcctaatacaatataaaactgtcacctataactattgccagtaatacctattgtgcctaacaagattctatctaattggtattggaatgggcacagccgcggccaattagacgcaagcgcgcgccgacataagcgcttggtcagcggagtaagcggagcacctgggcactccgctcagcttgaagctccgtgaacgaggcggcgcttcaatttccatcctcttcaatcgctttacgctcactccgtgcttgctttccggtcaccatttgcatgtcggcgtcttcgtgcggctcacgaaccggatccgccttccagtttatgccagtattgcaaactcccgacgcgcacgccggcacgccgcctcacgagcttgaacaatcccaacgaatcgcaaataccgaaggcgacaagccagtgggatcgcttatacattactttgaagaaaagagacccgtgagtgtactggtagcgtgaatacctatccccgagtccattccggtcctcagctttgtcctccggcctttctttgtatccatccgcgcctcttcggtgtagcattgggtcgggatagccatccctcggctttgtaacatgggctgacttctttgtggtcgccgcggcgcactaactctagcagataggaaacaacttttcagatctctgcgcaatcgactctgccgtctcgcatatcggaatcgtccaccccataaattccaatataaatttcaccacagagtgagcgacaggcctattacaagaggcggcagcctatccagtttattccgctctttgcgggcaggatggctagcccgtttaacccttctgcgggccgtggccacaggggaggcgcgccgggcgtgcaaggctcaacgggacggggaagaggtggccatacatcgacatatgtgccgagagggtcaggtgcgcctcgcgcagcgagggctcgagggcgtgggcgggggtcagcgacatggacagctcgtggccgtggtcgcggcgcaggcgctgcaggccacaccgtgaatgaaccccaacaacccgcggagggccccaagcctggtgttgtcaaatcaccgtttacgcaatcgaaccagcaaaaagccgccgccgcgtcgccgtttggggctcagcccgcccagcagtctccattttccagagtctcaaacagtgcttccgcctcgaacgtcgccaaaaacccattcgcccaacctacgaacattgcgaaacaacaaccttcgacgaaatttgttggcgcgggatctaatgttgcggccgccatggagcatgcatcgacgttaaacaattaccaggaacgctttgacaaagtcagtctgctcttctcaaaaacgggcaatacaactacggagctaaccaactttgcagctgaaaattgatcaagtgaggcagcgcgaaagggcgatcaaggatgggcaaatggcggaccctaatcagccaacttccttgaaccatgctatcacacccgtgggtacctgcaccagcatgtgtcctgatttcgagagggtggagcgaatcgtgcagaaagcagtcgacaaatgtgaaaaggtaatggtgcgccaatttctattttggtgccgttgctgacacgcatatagtattacaacccgtcaacggaccagctggaaatcatggaaaccaaaatggtgaaacgcttccggcgtgcggcagctggaaatgacgagcaattgccctcggatatccggacaccaaagacacttttacaaaccatgaactacctgatccgttatgttatcaacggtggtgaaccgttagccgtcatccacatgtttgtctggaatcggacacggtcaatccgaaatgacttctcggtgcagcaacttacacaagaagaagacgtgaagacagccgtcacttgcctagaaaggattgcgcggttccatatcgtgtccctgcatcttctttctaaccccgcgaacacggagcagtttgaccgtcaccaggagcgtgagcagctcaacaacaccatgctctctctcatgtactactacgatgacaaccgcgagcgcatccacttccctaacgaggacgagttccgtgcctaccacatcttgttctcgatccatgaccaacggcctgacctggaagctcgtgttcagaaatggccaactaccctacttgcttcgcctcgagtgcaggtggcattggaactatttgctgctgcctgtaatacatgggagcctcaaggtgctctggattttcgtcgaccgaatgcaattgctcagggattctacgctcgcttcttcaacatcatcaattccccgagtgtgtcatatctgatggcctgtgtggctgaggtctacttcaaccacattcgtcagacagctatccgtgcaatctggaaagcctactgccggactccgctgtcacagcaatccaaaaacgatcactggactgtggaggaattaactaaggtgttgcactttgatgacgacgagcaaacagtcgaatactgtactgctcaagggttacagtttgctgagaacgcaagtggtggactctacctcaattggggtgatcgaccagtagactctgtcggtaagtgattttaagcaacttcatctcagccgagtctcgtttggtttcatttcccacttcacccatctccctcggcccaagtttatgataccttccatcccatttcttcctctttctttgtttcgtgactaagaatttcccagactttgcgccttcatctgaccactctttctctgaaacatatgtggagtcaaagcgcgcaggacgtagtcttgtcgccatcattctcggcatgaacatcagagaagccgcaagaatgggcatgattgatcgctcccagttgtcccaaaagtgtgaaactctgcctagggcagaggcagaagatggggatctcttcgtgagtgatattgataatcagacgcccgcaccagtggttgaaacaccgaacgcccttcttcaggacacatctgcttctgaattccgggtcgcttctgagtctcagaaacctttacaacctacccctgcagctacgccttcactgttccagtcaaatctaccaccaaccgcttcaaagccgccaaatcctttcgcgccggcctttcagccatctaaaatggcatctcctccctcaaatccattcggaacttcgatcccctccaccactgttacgcccgcagctccgtctcctttcacttcttcgccaaatccgttctcgttcccaaaagagcccgaaaagaccgacacctttgccgtgaccactaatgtggctccctcggccttccagacaaaaccccctccttcacagcctgacactaccgacaaggcagctgttccgccatttactcctgccggcccttcaccatccgcttctgcctctacttcttcgtctgtttttccaaagccagcagacgccgaactcgaggcacctacaacaacttcccctgctcccacgtttcctaagcccaatttattccctcctgcaccgtcaactgcaaacaagcccgcttccgtgttcccaaatggcggccccggttctgtatcgactggcccgagccctttcactgcgccgtctccattttccttccccaagccatcggagtcaacccaaaagacggaggctcctgcggtaaccacacctgcgcagtctacgctcttcaatcccagcacttcacctcctgaggcgccggctgcggagaaacccgcgtctgtattctcttccggcgcaggcgcgttcactgcgccgtctccattctccttctccaagccatcagagcctaaccagaagacggagacaccggcaacagttgccgccgcgccctctacgctgttcaagccgtcatctcctgcatcgttggctgaatccaagaatcccttcgcatcttcggcgttctctggtgctacctttggccagacgtccatgtttccaaaggcaagccctgaggtgggcaaacctgctgcagatgtttctacacagtctacgatgttcaagaacgacaccaaaacacaacaatcatcgattgcgtcgaacaatccttttgcactcccgagtgctccgttatctttcccatctgctgctacctctgctgctccatctccattccaaggccccaaggccccagagacagctgtcaaagccaaggaacctgcagctgcattgagttccgggcagccttcctcgcaattctcaatgaacaatgcaggatcgtcggctgcaactcaatttccagttcctggctcagtctttgcggctcccaagccaccgcagccaagccagaaagcggacattccagcaactacagcgcccacgcccgagaagcccctattcacccgatctccgtcattgggtagtttacagtcacccaagctgagtgaaacttcagtactcagtcagtcggcacctgcacaggctcaaatacctggcccgcctcccatcaacggctccgcttcggtttcgggcacgcgtaggtctgtttcgcacactcaagcgaccgccccctcacctccccggactctctttgaagcacttcgacagcctaaaatatttgatgccacatcgagtacatactcgcctgaagcggcaactgctcagccgtcagcgcccttgttccaaggcccagaaccctcggtggcgcctggacatcaagcgtcattgaaacgacaacatgaggccaccgatgcagaagcacgccttcagcacaagaggcgctcctcgctgaaaggaaaatctcccgctgcagcgcccgatggatcattcaaacggtccgttcatttcgaagaggaagagcctctgtcacgggagtcgcaagtgtcttcggcgcgcaagaagtctaaagtcctcaaaaagaagcgagtctcggatgagcaaactgagcctcagctggaggaagagggcccaagtactaaggcgcccaaggtttccacagcggaagaacatgtccctttcaacttctccgtctacaaagcagaaaaccggcccataccgaagctcccgatcttggaaaagttggaagaaaagcttgcacgagccaaggccttgtgcgagccgaagcccctgaccgaggaacaactccagtacattgaagaagctcgactgaaacgggctcgccaagtcgatgaggacgagattgccctctcacgagcacggatcttggccgagaagttgaggacgggccctggaatcttcgacggttggaccggaagaatccgagagccatggcacgacccaaactggaatcccattgcccggatcgtggaaaagtatcaagcccgaaatattccccaaccaaattcctatgtacccccgcgtctgacactcaatcgcactgccagaggatacgaggtcgcttacgctcctgatacaccggaccgacctatgtcccgaaccgaacagcgtattcgacgcactggtgcccgtggacttgcgcatgtgcctctggatttcgaacgtcataagcgagagaaagaggagatggctaagagcaagagcggaaagaaggaagataacgacaaagacaagaaggatgaggaagggaaagacgtgtcttcccagggtgtttaaggagacgcactacgctttgcttattccccatgttgtgattatctcatggtgtatctcactgatttgttctcctctcatatgggccatggatctgcatacccgcttactgtgctcatctcacgttttgcatttcgtggagttctgttttcccccgatggacattcgcagcggaaatttattcatatctttcatttactttctttttctagttataaacagcctgagttataaaagaggcgtctagttacgggatatagtggcatatcacatctccactggggagacaatgataatatgtatagatctacgatgtacgtaggtattacacctctgccctcattctacggacgtggtttcctgcctcctaaggcagataccacctaatcaaaccgaggtcactccagggctactacttgtagttactatatcccaagtctacaatcatgccgggtcttagtgagctcctcaatcgacaaccacccacacacaccgtgggaacaattcctggcccagccttgcatctttcttgcgcggaagctgtacacttggcgtcaacccatccctgcaaaaccactcacaaatcctgttactatcgtctgcatctccgatactcacaacagtcaacctagcctatattcttagatttacgatctcttctaagcgatatagttaagtgctattttctatgggcgcagacacccatcatagcattatgatagataccacttgtcgtcatctttccatcattgtttgttctatagatcagtctaatattgcaagcaatacctataccatcgaaatggcataggtattctgctagatagttgtcaagcaggtgcccatcaatttcttgtaggctccaagctcccagctaaacttcccctaaacccttatatcagattgcaacgcaggatagtaggaacatgatgagaagaatcaggaaagaggcggagagcgaagcggtaaatctgtatggtcgaccaataatagcacccattgttcagctacatcgatgcacgtcaatgtccatcctgtatgagagcatcactagggaaatcaccactagtctgcaaagctctcgggatcacatatcagtagcggccaatcacttgtttgaccttgtgccttgggttgcatccaagtccactgtcgcttctgagggcgcttaatggctatctctttgggcaatcacgctagcataccatggcgggctccttcagaatgatcgcgaaccctgtcaacctttcgaccttagctcgaccttcaattccaattttccaattcccttggcgtcgaaatttcgacttaaggtcttccgtgcggccaaacactacaaaggccgggaatcatcacgtcaagtataactggatcaagggcgtggagacacttgagttatatcagcctgggggatatcatcccgttatggttggtgatgtcttacacgaccgttatcatattgcagacaagcttggcttcggggcctattcgacggtttggcttgcccgagatactcgtctaaacagatacgttactcttaaggtcagcatagccgacatggttcagcgcgagacaaaaatcctcaaggctctgtctactccgactccgtcgtcctcggtacatcctgggcgtggtttggtgcctgttttcctagatgaattcgaactgcaaggccctaatggaaaacatatgtgctacgcggtggcccctgcacaatgcaaccttagggaggcttcttttagccgtcttttccctctcgaagtcgctcgagcactatcgtatcgactctcacaggctgttgcttacacacattcacacggctatgttcatggaggtgggttatagtcactaaagatttgaatattagctaaaatcttgggtgactcagatattcatttaaataacattttatccaagctgccgtcaagtttcgatgagctttctataaagcaattctacgacagattcggaccacccgagacagtccctatcacacggcgtgacggaggaccattgccccctaatgttccatctaaagctgttgtgccgctatttatctggaaatctgcggagatgttctcattatccgacgcacacccgcttctaactgactttggtgaagctttccctcccgcttcagaaagtcttggacaggattgccacacgccaatcccgttccgagctccggaggctaagttcgaatttcaaagcccgctctcgtatccctcagatatctggagtttagccacggcgatctgggagattgtggggatgggggctatatttagtactgattttgtggatgaggatcatatagtggctcggcatattgacgtattaggacctatgccatcggaatggtggcaccgctggcacgcacggtctcgattttttgacgagcatggacagccaacggagtcatataggggaaataggtggcctccgcttgaggaatcatttgagattggtgtgcagaaatggagacggaagatgggaggcaagattgaggaagacgagaaagatgcgtttctggatttgatgcgccgtatgttgtcttaccggccggaaaaccgagcaactgctgaagaggtgttaatgtcagattggatggtcaaatgggcgttacctgattgcgagcggagttgaaggcatttccttgcgtttgatactcaaaatccatgtgctaataaccaaattacaaggatcgatgcacaattctccgaataaaccggtgttgagtgcggtagttgataataggaagtttggaggtgtagtcaacgtaggtttggatgctaagaagcacatgggtaggtcacggcgaaaggaataaaaactatacgggaggagccaatactcagtggcatatatcaaacaacataaatgcatcattggagaaagactctcgagatctgtcaagcactatgggaaacaccattgcaatgcttgggcgggtctagcaactgatattcacccctgaggcatcaactttcatatgacccgccccagaatatcgcccttccgtccaaacaccaatactctacaagtatatcgcgcctgactcggactcaaaaatcgcgtataaataattatattgagtatatcgggatatagttcgaggatttcaactcgccatcattctggcaaaaatcctgccccgctgtgtccgcgtcgggaccagaagacacggacttcatacctcgacgtcaagaacgccaacttcgaacccatttctatcacgattcacacagaaacttgccattacacaacgcgtgtcattccttaactttcgaaatttctcaacctcactgtctcacaaaatgaggattgcaagccttcaattcgcgccaaagctgggcgatctcaaaggcaatatcgagaaagcaaatgctttactgaagactggcaagaccatttctgtagatgggaaggagctcggagtcggggttgatctgttgaagcctgatatcttggtgctgcccgagttggccttgacaggtacgtacctactcaacttgtccacgagcgtgtattgagcagcagaacctcgtcttccccctagtttatgacgtttagctcaatttgtggggaattttcgctaatgaataactaggctataacttcccttccttggaagcgatcaagccatatctcgagccagccagcgacggcccctctggctcgtgggcgcgtgaaactgccagacgcttgcgatgcaaggtctgcgtggggtatccggagattgagaaggattctcaaaatccagacaacgccacgtactataactcactccttgttgtcgatgaggatggggagttcatcctcaactaccgcaagagcttcttgtattacaccgacgaaacgtgggcggctgaaggccaagctgagcgaggctttcatgagctcgaattcacttgccaaggcacagtttcttccttgagaagcccggtgcaccagggtgagcaggctttatccgagaaaaagcgggtcgcgacttcgcttggtatctgcatggatatcaatccatacaagtttgaagcgccattcaccgagtgggaatttgcgacccgagtccttgactctaaatcccagcttgtcattctgtccatggcctggttgaccatcctgagccgagaagagctcgacgccttgaaggataagcccgagatggatactttcaactattggcttcagcggttctggcccctgttgcaaaagaagatggaacatgaggtggatctggacggcggcaaggcggcagattctccgaagaagatcgtcatcgtcttttctaatcggtcgggcgaggagccacctacagaggataccaagccaccggcacggtatgcgggaacaagcgctatcatcgctgtgacgcaacggcccacacccaatcctgcggagaaatatgcaaggtcaggtgcgtacaccaccgatgcggaaagtgagacaggggatgcggtcatcccattcgacgtcaagatactttgctgggacatgctaggcgccacggaggaaggtatttgttttgcggatactacggcagatccacaaatggtatttgcacttaaaaaggcgtctgagtgaggcagcgcactggacgcgtcagactattccacagataatgcggagtctatgaccagatcgagggtccacccttgcgacatgacattagaaatggcaattcggtcacccgagtctctgtgatacctcctaatcccaggatatatgcaccagacggtgtatattgctctatgttatggtgatcttccctgcaagaatggaaactccaccgtttgccacaggcgcatcatgtgcaggtaatccatgtgataggggacttgaacgtgatgacatatagaagaagatcatcgagatcgtcgcaatcttcaggaaaagctcagatacttagcttaattttgcatcggggtggaattctgaggtctcatgatcactcagacttcacattcatcaatatgcaggcgatgtactggggaagacccttttagatatccgatgcaaccctttggagacatggtggtgtgaaggacttggggaatcctatttcaggatgcttagtctgaaacatgtgattctcctctcccccaccccgatgagggatcagaggtaaacagatgagaactagaaacgaagtaccctgtaagctagctatattgtaaagagaactgttatatcgcaatctagatcagcacacccactacataatgcacgactttgtttcccgttgctacctttgttctgggatattcccctgttgtgtttcctgattcagtcgaagggggtatcctatacactagtggccctagcctgagcgcatgcagagagacactcggacggtcacttcggatcaaatgccgggtatatcgcatgtagctagtaggcttctagtgtgtctagactacgtccatatacttgataaatgtgtagataactagaatttcttggtatccgacggtccgatcccccctcgtagtgggtgaagagagcctgtgattggcccataagatatccttacacgtgatctagggatttccccctccgagagctgtcagccaatcagaggccaagaaagaaggtgtgcagcagaggggcacggggtagctgcacatgacttgcgatgagagatggaggcgtagaatccccggagctattcaagcattttagttggttatcttcagctcctgctgtccgtttctttatggtcgtgtctgcaaaattgtctagacctccagggctcctcggtggctcatttacggtatgcggtttgcttacgtcagtggacttttttgaataaggcaatcaggtgactttgcactgttggtcgttctgatccgccgtattcagcgcgactcctcctcttgaccacctccttgccacgtgagcaatccatcttgaacttgtccgctgctctacatcttcctaaagaaacgcgttttcttgtatctaaatttaccgcgaggtagattgctaagtcctttgcatatcttagtatcggcttcctcaaattttcaactttccctttttcgcgtcccaatttcgaactcggggtttcgcagacaacgtgacctgcgtcttgttgttgtcgggcaggtgacttcctgtcaggtgataaagagagatcatcccaaggtacggctccatcaatacccccatccccatccagaaccccccatgtcattgcaaatcgtgtcgcgatgcccatcgcaagtggtgtccttcacgacgctgcccccctgtgtgacctcaactgcctgcaagccatcatgacgcgttcttgatatctgcagccccgcggatgtctcgaggcatcgcattatatgcgatcgcttgacaacgtcccttccctgtagaactatccatgcactgccgcccgccaggaaaacctactggcgatggctgagcccgacgttggccggcctccgtgggatgcattacaagcgcgtcagatccacgcgtctgtttacttcgcgggggtgccactgatcttcccgagagggacttgatctgccaggcgccaacttatcgcaggctgcattgacttctccaatcacataccgttgtcttgttctcctattctccgggacttgttttcactttactcttcacttattggccactaaccaccaccacgaataggaagatcagctttaaagctcagcatgtctgaccccaccatgaacagcccagataacggctcgcataagcgcaagagagatggctctgaggatctaggtcccgacccgcagcgccttaaccgctcctcccacggaagcaacggcagcatggataaccagcacaactttggccactctgcgctcggaaactacgaccacgggcttcccaacactggcgctgagctcaacattgatcaacaaattcttcaacatgttggtccgcagaacggtctgtccgacgataatgcgttgaccgcaaatgccaaggccgccctggctgcacacactcctcaacacaagtacccccctcctcccgactccggctttgatgccagcaacctcacccaagggctgtcctttggcgatgagatgaaccagactcccatgggtggtggtcacaaccacaattcgactgctgctgcggtctatgccgcgcgcgaggctcagagtatgaaccagaagcctaccgttggttctcccgaatggcaccagatccgcaagaacaatcacaaagaaggtaagaagcacatttccgaccgagttcgtgtttgtatactgaccccttcctctagttgaacgtcgccgccgcgaagctattaatgagggtatcaaccaaattgctcgtcttgtgccgaactgcgataagaacaagggcgcgattctgcaacgtgcgatcgaatatatcctccagctccaggaagaaaagaagaacatcgatgagcaatttgagaagcacagtctgactgctaatcatgctatcgccgagatcagcggctcgaactccaagctcaaaggcgaggtcgcccgacgcaacaacattgctctaaagtggctgacacgttgccgggatgccggcctcgactttgatgattacgaggagtcaaaagagctagagtcactggagatggattaggcttatcatccttgttcttctgcatgtgctacgacttgttgcgttccggaggtcaatacttgaacataccctcatctctgtttttcaaatctgctattctgctgttgacagatattttctcttcttaccatggacgtttcctccaattgatgtaccctcaccatgaacctctccttacgcgcgtctcttcgcaatacggtctgcccctggcattctgagtgtttctgagttgttacatttcccactaactacccttgcgacttgtgcaattttctcttctgctgttgcttaccccctttgatcattctctgctcacacacatctgcggtctttgtacgctacctgggctttgttttctgttttctgttttcttttactttctttcatcattaatggattgtgggctggcgaatcaacggctggaatgggtttgccttggaacggagctgcgggttgataagtccttatttgaaactgttttattctatccctttctctactgcttcgtaggaacagtgttgtagttgtatattcagttacccagtcgcaacaagagcaacctcgggtgactcgggccctcccgagtcacccgaggaagaacgaacacatcgagttatgtatatagtgcctcacggagttgattagttagtgcctaaacatggccctaataaagatcgacaagtatgtacctaaatgtacatccataaggcgtgataagcagatcagccactgacggagcggagataacacagccctgatcagcttataggctacccctctatgatgtcaacgtggacgtccacctttccttctacttaaattctactttctcctttcttacacatttccatcatctaaacatgtcttcctatattgtgagtaaacaacacattcagaaaatagacatcttgctgaccctcctagatcacctgcaagccaaccgcaaccgacgacgaggtccaggcgtatgcatcttacgctggtagatagtcatttgaaatacactatactaatacatggatgtcttttagtgtcaaggaccacgctcagaagcaaggcggtactattggacacgagtactcgttgatcaagggctttgcgtgagttatctcgacactcggtcttcttccagcgtgagatggctaattcttgatcttgaccttagtgttactttccctaaggatacggtccacagcctcgatgcacacccgcatgtggacaatgtcgaggccgataaggaagtgacgacgcagtaattgtccagatgtgaggttgcggatcagctgcatggcaggagcatagattcgttagcgttgtatcatggcctacccaggttatggggtatacgacttagcttttactagtcaagcacggaattacaatagatcaaacgaactatatgtttcagatatagagtgcccttgtacaatcgaccttgctatagatcagttcagttgcaatagactaaatagcgaacacagacatcctcatcacaccatcaaaccacctcgataagaatattaacagaagaaaataaatataaaccccctccgcttaacaaatctacaagttcgacccagcagtgacttcactcccagacgaaacaccaacatccttaacaacaacagtgctgccactagcaccggtaatccgcacatcaacagtactagtcccgaacccggcagtgttctcgaagtagttatagtaagtgcgggtggtgctctgccacgaactaccgccgtcagtgctaacctccaacgcagtcacagcctcattggcattgacaacctgcatcgagaaccagtaggcagatgtgccctccttgttcttgagctttagtggtccgtccaggtcgcatggcacgtacgaccaggtcgtttggatgatgccggcggagatatcggagagctcggcgaaggcctcttggaagaggtctaggtggttgctttcgcattcggggcattggtcgacgatctgggttgggttagagcctgtcgggatgggatgggatggggcggaatggtatgggatggggcggaatggtatgggatggaatcagggcttggctcaccattgctttgatggagttacccttcggtccggtgacggatacacaggcgccgcagtttgcggcatcgtcccatcgctggagggagagggccgtgccgaagaggtggcttgggagggtgtagccggagaacgagcatgttccgccgccgacattgccaccgtagaaggtggcttttccgggggttccgttggaggagccggtggatgcggatttggtggaagaggtggaagtggaagacttggtggaagtgctggcgacttccgcgggagcttcggtggtggagggctgcacgacgggggtcttcacggctggggcagcaatggtctcgatgacggcggcagtctcggctgatgcagtgggcagaggagccacgactgcatcggtcttcggagctgcggtctcggcgacttcggtctcggcagcaggagctgaagagcttgtggtctcgacttggataactgcgacgggagtcgtagactccacggcaatggcaggagaggatgaggccaatgtgggctcagcgggcggttgagactcgacaatagccggagtagactccacggaggtcgtagatgggtaggattccacggtgatggtcttgtagtagacgctcatggtgtagcccttcgggcagtatccgtcatgttcgcgggcgcccaatgggccagcggatacagtggcagcgctgaaaagagcggccacggaggctagacgaagatacttcattgttggatgaagtaaatattgaagggttcggtaagacaaagtaccgaagatggaatgaatgacagtcacagattgactttttaaaaatgataggacgtgcaggtgcacttcaaaagaatggacgtctggataacgaatgccagattcgaaagagatactgttccagacaggaagtagtgcaaagaaagcgaaagaaggtatggaaagagggagaaaaagatgggatgggggagatataagtctaagcgccgttaagagtccatgctcatactccatatggcttgatgaactagtaaattgatcatttcatccgtaagaactatgctcaaaaggtgaaacacgccgtggatcgtgggccagtgtgaatgctccggagaagccgaaaagggcgattgacccatagtgctataccgagttagggttagtggaggttgtttaaattaaagaggaaatgactgtgagtcaaggtaaaatgagattctgttcctagcctattagtgggtttctcagaaagaaaaatcaaaagaactaaacagccctggactatcgagcatcccacataatctcgttcagccttagtagcgcatccgcactggcctttttcgccgacataaagtcctctcggctctccgccccgcgtggaccacggagaatttcagagaaacataggtctacgagaacacgcagctcctcgtaggtaaatggctcgccgtttccagcagccaaggctttgtcgccttgtgacgcgaaagcctccttctcttccttggcgtagtccaaggccttctcggcgccttctaggaaccagtccaggaacttggcgctgcgtggtagagcaacgatttcttgggaagcctgcgcctgcaaatctgcagttgactctgatgaatcaccagttggatcgatgatgatgttcttcaagttctgttggagaacaagcacatcaagctggagtcgcagcgctccattctcattcatggccccgatatactgggtacaggcgacaaagactcgatcgataaaccgtgccagacccgaagtgatgaaccaacgctcaacagatcccaaatacgtcgagatgttggtgtcgaatgcgatgagatcattgttgagtgcgagaattgttggtgatgcagcggttggttgattcatgataatgtgccaccagttgtccgttgtgtttggggatggggtgacaggctcagagttccgcaaattaggaggattcggcccggacattgttttggtcaacatgtggatgattccacagcggatgtcaacatgcatcgtcataattgcagtatccccaagccggtgtagtgattcgagcgtcccatcgaagaccacggcagtctcgtggttgagtggcaaatgcaccgggtgattgatgctatcgcggttgggcttcacggacccgaacagagtccatctgcgagacggtcggccagttgcagtcaaactggatgactcggcatccgcggtatgttcaaccacaagtcggattcttgcgaggtgacttgagagccattgcatgctgttgtacaagagcgaaagggaaatgacggttttcgggtcagatatgatgtcgtaaggctgtaaaggcacttggcctgttcgcttgagaagaaggtcgatttccgtatcaatcagggtctgtttcttatccccggcatctttccacagttcatccacaacatcatggatgtcgcctgaatcagcaaaggaagccgcagctttcagttggacttcgcctccacggttccgcgcagagactttcgtgaccattgctttgtaccacccacagcacttgtcataataggtcacaatctggtcaataagaagctgcgtgaatgtttggtcatgtggaatactcgacagcattttgctaaattcccgaacaatggacatgaatttgatcgttcccctgaaaataggccgaggagagaacttggcccagtgggggtcttctgtaaacgcatctgcggcgatgaaactgagcgtgcagaggtccgtcactgtttcatccaactgcggcaggaagacattgaccatgaagtcgtccaaaaatgaggtcaaactgcccatggaaatatccgaatccacaggaacaatatccttaagccgctggatgaaggatagagagggaggaagaaggattcccatattgaagacacttggctcgagcaaaatcttatgcccagttcccgagttgcccttattagattgcgtagtatcgcttgttgcagccttttgcctggacttagaaacaagccctggtactgacgacttgaggatttcatcgagttcgtcttgttcggctttcatctcagaattttgctcgatatcggacaacttaaacattttctacaatgcaaacaatcagctagttgaaagtactgaaaacgccggtttcttaccttattcttatcgcggtttcctgtgtatagatgacgtcgagcatcattctcctccgatctagatcgaacagaagagtccccatcggttgcaagatagtcgtgcatgagagatcgtatctggcaaaacagattaatatccgcgatgcctgtcaaaaccgttggcatcttacctcgctttgtagaagtttccacaactccttgaatcctccagaaagcgtctcgcttttgattaaaccttctcgttcaacaatggccgcaatgacatcgtgaagaattcggtggccttccgcgattgcctcaaacttggcatacagtgcccacaaaaactcagaaagcacgtggccccgtttttcaataatctcagtggggagactggactgtttgtagttgtcctgggctgagaagctcttggttggcgcaggatagcgagtatcgacctctgcgttcgtcttatccaccacagcaaacagttcgaccggaagacgctgctcgatcctgtgaaccgcgacgtcgagatgacccatcttgttcaacgcttcgatcaataactgaatgtaggaaaacgtgtctgcctccggattccgggaggcgtcttcgaccataggcgtcaagggatcgaacttagccaggaaactatacacaggacgttcccaagagcgactaccggctaagttagatgtatgcacctctttttcatcagatgcgggtgctttccatcggtcagagcaatagggtgatttgaggtacaaatggtcgtgcaactcttcgatcagaatgtctgtgagcgacgtttcctggtttgtgaaataagcgcgaatatcggatagagcaccaatatcctccagttcagagcgccgtagaactcggagaccagtgtgaagcacatccacagctgcaaggaagcgcttatctgagatctgagattccaatttctcgggaagggattggatttcctcaatctgagtgaacagctgtacgatatcatcgtagttctgagaagacgttgcaagcccttttaactctggcttggtcgatattaacccggttttggcctggtccagggcatgtctcaggctgcgtacccgagcttgcgaggaagatatattggattggattttgtggtatgttccaatagaactgttaaatccctgatggtgttctgtaacatgaaactttagcatatgtctgtcctaaccactgcagagaggacctaccattgacaattgccttcaatgtcttctggatgtcattgtacatatgcaaaaactccggttcacggtccgctttgcccaatgtactcgtgtccatcaaactcaaagcaacgtgcaccgggacacactcggaatcagtcataaaatcccaatcgcgctggatagactggagaatagctgtaggaggtagccggattagctgttgggccaggctagtcaaaagagaaagacatactttcaatggcctggggttcccccgagtcattactcgagttaaccacaggcgacgcattcctctggctcctgtggtccctttgttccctttgttcccttgggtctctcttgtctctgtggtctcggtggtctctttggcctctcgggtcccgttgatccctttggtccctgttgtccgcgtaccgatttgcatctctagaccgttcttcctggtatttcctgtctggttcttgattccttgtgcgtgatcgcgaagaggggtgcgaagaggcttgcgaggaggggtgcgaggaggggttcgaagagggttgcggagagggctgctgccagccccggtccgttcgatcacgccgccgctcgggcgactggcccggcgcaggagattggcctggcgatagcgccggaggcggaggcgcgtcggggtagaaaccaccgtatccgccggggcgacgatctgaacgtccacctccgcctggtggtgcggcacgtccaccgtatccttctaccgcagggttgctgtttccaccgtatcccccgtcattggcatcgtaccgaccggaactggtgtagccatacccgttaccataaccgttttggccgctcattccaaatgatgcccgctaatcacggggtgctctggttcagtatggaagcgttggtgggctgtgacaaggggctggcggggggctgttagccagaagggttcggtattaggtcctgtaacttgcgcgcaacagttggcgagaggctgcgagcattcttaggtgtgaaatacagggagcgctggaagcaattcggtgatgccgtggtgatagtgttgaaacagaccggggcggagtgtcaggctccaccagagcttcccgcattccgttccactggccagttgtcagtgtactatgaaaatgaaagccggggcttacaacgtatacatagactttcgttacaacttcgtatttgattcactctttggtattcatttctagatacagcatcgaaatcgtgcatattctaggctgtattctacatagtgccgtctaatcaatagcagtggatatcaaaccacagcccatcaagcccgtagaccacccacccacttattttgagataggctgggtctcacgctcgagccacgagcgagtcagattgtcttcccggaagaagtgctctgtcttcgcccagatctcagcatggtagtcgtttacccacttaagctcggcatcgctcaaaagcgacggctcaatcaggttgcgaccaataggagtcattgtaacatgctcaaagcctagccactgcttgtcaccaaagttgtgagcagtcttaacttcgcgagccatgacgatgtctataaagagaacgattagcatttttccaattgaagtcataggcagtacaactcactctcaattcgaataccaaatttgccgtcctcgtagtagccgggttctgtgtcagaaattagtttcggactacaataaatagatgaagaggtacaaaccatccgagatgacatttccggcggcaatgggcacctcggtatactgaacccgagtcccgatgccaataggaccctcgtggacgttctaaacaaacattagcaaagtgtaaggtgtctcatcggcggtaatactcaccagataggaaccaacgccatggcctgttccgtgaaggaagtccaagccttccctccacaagtgctggcgcgccaacacgtcaattgcaaagccactggtgcccttggggaacactgccatgtcgattccaatagttcccttcagtaccaacgtgaaagcacgtttctcgaactctgtgggaacgccgaagtggaatgtcctcgtggtgtctgtcgtgccatcgaagtattgacaaccagagtcgcagagatagatggcactgggatcgatgatagcacagcttcccttctcgggcttatagtggatgacggcaccgttgggcccagtggacgagatcgtatcgaaggagagaccagcgaacagatcatgcttagagcggatctgttccaacttatcagctccgtcgacttcgtccaagacagtcttcttgttgataagttcgttttcaagccaagcaaagtactcggtcagagcagcaccatcgcggatatggcacgcccgcattccttcgagttcggtttcattcttaatagcctttgcatcggcgactgggctgcgggcctcttcaacctgtccctcgccaccaaggctaaggctgagagcccaagaagccttgttcgacaacaagaacttggcggcgttctcacccgcagactggcttttggtgctgagggcttgagcgtcagcaaagatggattcgtatggcttgacgacaacgtcttgtcccaagtgagctttgacctctggtgtcaacttgtcatcctcgacgtagatctcagcggtggtgggcgtaataaccgcataagagaaaaacacggggttgtagggaatacttctcaaagtcagtcaattgccaatgatgcatcacggtaaagacagtgttcttactcggttcctctcaggttgaatagccaagcaatttcatcgagcatagctgcaatagattagtcactctacaggactgggatatattcgaggtggccatacagatgacgaatccggccttcttcttcgactcaagttccttccgcagctcggccaccttttcttggaacgtcttgccggcatacttctcggggtgaacgcgcactttctcactgggacgcgcagggcgttccttcccccaaaccaagtcgaccaaattctcccggacccctacgagggatgaaccattctttttaagggtctctgccaacttccgtgcaccagctattgaaggttagcgccactatacacctccacatctgacataattatactcacatgctgtgatcagagaaggatcaacacccacagccttgcctccttgggcctcttccgtggtcctatcaacaatatcagttcccgtacaagccatgcccgcacgactgtctctcgtaccattcctgccatgtgggcacaccctcaactccacccttcaagagctgccagttgttatccaattgtttcgcagcttggttgaagtaccgtccgtcggtggacaatgcagctttgctcagtgagataattgcagtaccggcggagccagagaatcccgaaatgaactctatgggaatgttagctgtcgacgcgggccaataaggggggcgatcattgacctcgacgggcatcacacggcgcaatatactcggactggtggctatcttctgagggcacaactatgcgaaactggtaagcacaactcgaggtttaagcaaccggctgagaaacagagatgatgtcatactgtaaacatccaccttgtgctgctgcatcaactgcctcagcttcgacagccgttcagaggtatccacggcccccatatcgacggtatagcgtggaccgaaaacggagaaatatcttggacgagggaggggccttagcgatcgcaaagatgtccaaaggcgaattgggtgggagaggagcatggacactggtagactccaagaggattcttcctcaacctgttagctttcgaaaagctaagcgaagcagggaatgaacgcgtcagataagtgcgcgataagctaattccgcaggtcgtgtggactccgtcgtaagtggccttttaccaagtaggcttttggccacagaccgatctccggagtcgcggctacacacggggcccacttggtgttgtcatgtttgcactcttttcaaagggaccttctagggacattgtacacaatcatattgttcgttccgaatgagaaattgtttttccagattgatcttatctgattttagtgccaccgataatagtataaaactaatcctttgtacgacatggcgccaagcttgatacccataccccataccctagaagtaacggtctcagcactaacaggacctgcccaagtgtgacttgtcggtagaagtaagaaatgcctcaagaagcaaaagctaggattccgtactatttccaaatcaagctccatccgctaaggatgacgccaaaagctcgagggtgtgccaaaacaagatattcaggatcgtgaggacaaggcaagtatagaaggttacagacgacagcgaaagcttggggaaacaaccttgttgaaggtcaatgttaatatgtactatataggtaggctcttgcatggattttcggttgtctgtttgggcattcttccttattggcgttcttcaacatatctactcaaaagaggtcatgtcatgtgcccgggattcagagaatgagccccgcagttaccgctctaataaccgccttagcggtgattggccaactgataccaacactagattctgccagtcatacccccgtgcttgtatatgtacacttctctttttcattttcacaaccacgcgcttgctgaaacaaaatggcaacatggatgtctgacgagggccttggagctagggaatcaatgtcagaagcccatattgtatgtgtgccttgtctacacctgacattcagctaacaaagaaccagctggttaccgagctctataacccagcgaaccagcgtgaccccgccagaattaatgagatccagacgcgtctccagcaacttcagaagacagaaaatgcatgggcaattgcagattcacttctgcagagtgaacactctgcccaacatcgtttcatgggggcccttacattcacagtgaagatcaatgtctcatggtacggtcaacctctccgatccgcgccacttcaagcttatacttatgtgacgataattgctgatgccggatatcattaggagcgaaatcaacgtgaattcggccacagagatcatgcagcacttgatcaatcgttttgttgctttggtaaccaatggtgagcaagcaatggttgtgagaaagcttgcctcaagcttggttgccattttcaggcaccctgtcacaccatggaaacaggctgtctggcagctggctgcaagcctcgtccacggtggatacgtatccgaagaggaatcacgggcggtggatttccaggagcggatactgccagcgttgagcaagagtggatcgggtgcgctcctgtttttctcaattgcactcgccgaggaggctctcagactggactctgagccccaggatggggctggagacacatccgccattcagcgagccatacataacattaaggatgggttgctcctggttcaatttgtccttggggagattatacagcatgcaaagacagctggggatgatgcagttgatgtggcacttgcagctgaagccatgaattcatggaaggtgagttaatctcggtttctggtacttccgttttgaagaatggggtcgctgatttgacttccatctcgcagacatggctaggtgttcatggaaaccgccaacgttcttctgctgaagatgtcaatgtcttggcggtgcgatgtggccataccgtcattgagacgttgagggtacccagcttgagtgaaagtgcagcttctattttgacgcaagccttcgaaacccgctcctgggcgtttgacgacaactcgttgtggcttatttctgaaatcctcgccgattcaatcgtaacagctcacattactgccgtgaagagcggcgatgaaggagtggagagcatgtcgtttgttgacctgcttattgcatacgtctcgcatttgcacttggatatcttcagcgaccctatgaccccacaaaatgcagcaatcctcgcacttatccatgggattttcaagacccctggctatgcttcaattgacgacctcgggaccccacgtgtcttggagttctggaacgatatcgcagaaagtctccccggtcaaatcgaagaaggcagctctaggtatgacttggtaaagtcacatctagcagaagttgttttgggtctttccagcaaactactatatccgaagtctgaagatctggaagactggggcgaggaagagcggagtgaattcggcgccttccgccatgacgcttgtgattacctactttcggcataccccgtcctcggcgtcgacctggtcactgtcttccagaggagcgccacgtcctgccttgaaagtcgggactggcgaaatttcgagactgccatgttctgcatagctcagctctcggaagcagtggatgagaatgggcacgccgaccagtgtctcgacgccatctttgggagcgatgcttttgccaggctctgcgcaggtggggagactgaaataccactcaaggctcgccagaccctggtggattcattcggaaagtatgaatcgtactttgagcgtcacagttcgttgcttcctgatgttctaaatatcctgttcgaatccctcaatttcgagttgtgtgcgcacgcggcttcaaggtctatattgactctttcaaaatcgtgtgctcgcgtcttgacgtcggatcttcccgcattcttagatcaactagatcagttcagaagcaagccgacggcaactgtgcccaccatgcctaaggtcctggaaggaattgcgaccatcatccagtgcttgcatagtgaccaggaaaaggtacaaacgctagaaagaattctcggcttctttgttcaggaagccaacacagcgcgggaagaggttaccggtcctgctcatgaatttggtcgtcaacgcggccaccttgtgctgagctgcattgcgagcatcggaaaaggccttcgttcagaaggcgaagtcatcgatatcgagcttaccaaggaaggagacccataccccctatccttctggaactctggaccaggtgccgaagcccagcgcctgattatggaggccatgagacttttgattgtcgacttccccgtggacagcagcatcattgaagcagcctgtgacattttgaaagctggttacactgagcgggcaggtcttttcgtcttcccgccttctatgacagtggactttatcaagagctttccccttggcatctccggtacagatgttatcatggcaactgcgtcgtcatttttggcatctcacgctcggcatgcgatgaacatccgcagtgaggctgaagcgcttatcgatcatgtagcccagctcttctcttcgatgctccaaaatccggacgtgtatgacccagagaccgctaatgccgggattgatttcctcacacgtcttttgccaaagtactatccgatattgttcactcccgcgaagtcaaatctgaccgcagagtcccctcttgctgtgcttcttcacttcacacttcacgcattgacacgacctgagccacttcctcttaaatctgcttctgcattctgggttgcattaatagatctccgcggcagctcaccggaagaaatgaacatactcgaatcggtccatcaggagtttatcccccgtttgtgttacacaatcatccagcagattgcaggccgatgcgcacgatcagacttggtctctctgaacgatgctctacgacgcactgttttcaagaaaatggcattggcgcgcccagctattaaggctgcactcgactctttggacgcccaggtcacagatgcgaacggacaacaagtgccgctcctatcggcgcaagacaagtcacggttcttggagtctctcgccattgctagaggcggtcagaaaccgtctctggatattgtgcgttctttctggttgaaatgccgtgggatgaattttgattatgcccaataatggagcttgcgtggtacatgacctgatgattggagttgatgggtcctgcaacttcggtgttcatttagatatccatttgcatgacatgcgtggtccagcttgatttaatcttacttgggagtttttacttgcattcatataagcgccataactgaggaatttccaaatcatctagtggttcggccggcgtacaaaaaaggaatcatatggtccaatgcgtaccagaccaatgcctatgctactgcccagcagtacatggcctaacaaaccatccgaccgctagcttcggtcccaagaggattccaggaggcctcattaagggctcattgctctaaagtaccgcacaacttaggttattgcctggggaatatcttgtcgttttatacaaatgccgaagcacgtgcctatagacccacttagcactaactctatcccaaagcatctgagagacatacaacacagcccacagagcaacaagagacatctcaaacgacacctaaaaatacattgcagtagtacattgataaaatatcatgttaagccaaccggatattaattggaagtatccaagccttacatcgccaggtatagaagctacataaccgactattcttatagatattatataggtttgagcatgatacaccgaaattgagtagcagaacacatcgtaagaacgttgaataccgttttccgcgaatagcctccaggactctttccgtaattccccgtcagcgggccgccgtcggagactacggagactccggcgtgacatggagatgacaaccgaagccccgattggccatattctcttagtcgcggactaaaaacgccaatcgtgacttttgctatcggcatgaagctccccagactcccggtgatcggtggctcggtgccggcagcctatcacgtggcagggcggggattagtttaattcgtattatgcaggagattctgccatgaagtaatagtcccgaatagtcgaagccctgtataatgtcggatacaattactctttttggcgaagaagcatttacactcaggaaagttcactacaacataggtgcaatgattggcttcagaaggacaaatgtgtcaaatcgtataatgtatatgtcacattagacatctactcatggctcatgtacagtaaatttttaggatacaacaatgatcaaggctgaaacacacagaaaagcatatctaccaaccacggccagccaacttatcagcctcgggcatttgcttcacattgataccaaccatagcctcaccaagaccctggctgacctcagcaagcaccttagggtccttgtagtgagtgacagcctggacaatagcgcgggcacgcttcttagcatcgccagacttgaaaataccagagccaacaaagacaccatcgcagcccagctgcatcatcagcgcagcatcggcaggggtggcaacaccaccagcggcgaagttaacgacaggcagacggccgagctcagcagcctggcgaacaagctcgtaaggagcctcgatctcacgggcgaacgcgcgcagctcaggctcggcgtcctggctggcgaggaggataccgcgggcacggctgatctgcgcattgacagtgcgcatgtgcttaacggcctcaacgacatcaccggtgccagcctcacccttagtgcggatcatagcggcgccctcggagatgcggcgcagggcctcgccgaggttgcggcaaccgcagacgaaggggaccttgtagccgtgcttggtgacgtggtagacatcgtcggcgggggtgaggacctcggattcgtcgatgtagtcaacgccaatggcttcaaggatctatatatcagtgttcgttagtaaaattgttactgtttgttcgcctcccccgccaccggagatctctgctttcgcctccatctgccgatctgcccctcccccgcatagagataattgttcacatacctggcattcaacaaagtggccgatacgggccttggccatgacgggaatggtcacggcttccatgatctccttgatcatgctggggtcggacatgcgcgcgacgccaccctcaacgcggatatcggcggggacacgctcgagagccataacggcagcggcaccggcttcttcagcaatgcgggcctggtagaggagtccgttagttctctatacttggccggatagtaaccaattcctcatagagaggtcatacctgctcggcgttcacgacgtccatgataacgccacccttcagcatctgggcgagaccggccttgacagtgaagtcattgccggtggttccgttgggagcagccattatgggttgtgtaaaagaagggaatataaacagaaaagaagagaactgaaggataataaaaggagaaaggaagagagcgttccgaaagtgagtcagtaagaaatacagttttccccaaagttacttgcctcaggccaatcacgacccagagtgcccctccgcaaaagttcccctgtcaacttgcctttcccgaggagatgcccctcggtgaacaacagaccgcctgctctctggggacacaagattttctcttggtcacgttacgcgagctcttccaaccttggaaggttccaaggctcgggacacttccaaggttggcattaacatgcctatttcagtaagtgagacctttccatcatttgggcaggtggcagtcaagagtcggattgatgagggaaccccaattctcgtgacttatcaatattaaactttatcctattttggcaggagagttacttgaagcataacacggtatctatcaggatacaagcacccatgcctggatatgcatacatatgtatatttattgattatacgtcatatacgtatgatccagggtcaactatgcagatatatgtgtactacatgtactgccatgttcccatcaatctaacattctacacattccagatgcctatatatctcccagtagtcataatatacatagcttaccagtcatggatctaacgaactagattagactctaaataagaaaaacaaccctggaacccaaacttcaaaccagagcctcaatccttcaagatccatccatagatgggctcagcgatatatgacgtcacctggcttccttatcggccaaggagcgcatatccatccataaacccttccaaatccgactctccaactccctcaattacaagatagacaagcaaaacagaccacaatgtcttttagattattcaccggccaaccagccaccctcctccgcctgggtctaggcttcggcatcggcctctccgccgcaaccatgcaccccttgtcgcccttccgcgccgccccaatgcaatgccagtacgccgtgccccaacaacccaccttcaacagagattcagagtgggctgttaattccgccgaatctttggggcagaagcagggccgtccgcggcagactggcctgttgaacgcggagactatgcgccaggttagtttggggagtgtgttgggccttgttgctggtgttgggttgagggcgttttcaaaggctttggttgttattttgggtatgggggttgttcttgttgaggtatgtataagcttctgccggagacttgggctttccattggctttggtgtttcgttgtcagacgttatggtatggtatggttatactcgggacggtgcgctgatgcttgttctcaatctagtacgctgcgtctaaagggtacaatatccttccgatcaaccgaattcagaaatatgttaagcgggtcgacttgcgtcgtgctatgagtgagaaacggccgttcaagatgagtttcggttttatgatggcgatggcggcgtttgcgaatttctaggttctgccttttcggttaaacggagatttaacgctacttgtacatacgaacaatgccaagttggtttttgccaactgacaaggacgcaatttgggcggttggacgcgcatatttgaattggtaaaatgttcattcgtacaggggtatcatgagtcttgatctattccacaccaaatacagagggggaatctatgctaccccagcaccagatcctccagcacgccctccatttcatcgcgggatagtggcacacccagaatctccatgccgctggcatccatgcgcgaagtgatcatctggtggtcgtggaactccttcagcagggtacggaacatcatctccgaagaagcgacaaactcttccgttgctttctggtaaagaaggcggaactcgatgccagtttcatcgccaggcttgccgccctctgccgcgccttcgtcgtctgactggtgaccgtcgtccagtagagtgatcagttctgtcagcaggagacgatacaggttgcgtgcattctcggggagactcttgagcacaaagcccacgccatctttcccgccgacacggcggcccttgcgtccaaggagagcgttaacctcctcgacgacgtcggcctctgctgagaacggaaggaaggttgtacagtcatggaagacgagattgagttgatcacgcagactgatgtcccacatgaccgggaaattgggggtatcggctgtaaccaggagacggatgtgcggtgttgcagccagacgggcaaggagcgcttggttagctgcgcgacggagaggcggggcatcgatggagttgatcaaaacggtgacgggctcttcatgcgatttgagcgcagattgtaggagttcgaggacttccgttggctgcgcgccaagcttagatggtgcattgtcgcccatcacggctgtgacgatcgtagcgaagattgatcgaatggatatgcctggcgtgtaaccattgaccattacgatggttggattcgtagtgtctgacaagcggtggtcgtaaatccactccgcgaattcatccgttagcttgcgcttggagccgtagccaaataggcagatgttgaacccttcatcgaactcgaaagcccactgcgggaaagatcggtggtgcaaggattgcaggtactccttctcttccttgcacggatcctcatattgtccaagcttctcgaaatattcctcatgcgttagcagcggtactttgttgagggtggcatttgatgtcttaacaggaccagcgcggttctggaagaagtatcgttcgtgggcagggagctcgccttccggtgtcggggagcgcttatttctagcacctttcggtcgtcctgcacgtcgctttggttgtttcactcctttttcgggggcatcatcttcgccttcaggttctatactctccgccagaggctgacctgcattctccgtgtcaggctgatctccatgtaagatttcctccgctagtcgttccgatccatcccaagctgtatcctcgtcctgctcgaacagcacccgtgcactcttcttccgcgcagatcggtccgcattcttcactcgagatggagtcgctgcagttgcggacttgggtttggtaggcgtagcgaacaagccacgagccttagatttgtgggtgggcgttttcagcccagactgttgtaacggcgttgcagaggcaccattggcctttttgggtgttgattgaccgcgtcctgatgggggcagctcgtaggaggcatcgccgtttgaaagtgaagcgttaggcgcgtggctgttcaacgcgccattggattgttctagggctgttcgtcttctttttggggtcgagacaggcggctggtcgccggcgtctgagagcttacgcttcatggcgctttagtcagattatagtcacgtagacgcgaagggaaggaagcaacaataccatcagatccggagaatgtgcacagggtcgcgacgcaagggggttccaaggtaaattcgagatctcgttattgaagggagctgcaggtctgacactggaatgcagggcttaattgggtctggaagtgcttgaaggaattgaattggagcgggtgggtttctccgactcggcgtctccaggttggaggtagaacggcgactatcgactgcactgtcttggattcaacacaatccgcgagattacaccttgtatcctgatctgtgtcatacgcggtcggtctctctactttgtattgttataaaagttcaattcaattttactccagagggttggactaaaaaagtcgcgcatgtagttgtcatgtgagcaaattcactgatcagactaaattccaacttcttatatttaaagtactcatagtattcagcaagcagaggccaaataatcaaatcactcaacatatccccagacacctcaactgcagtgggctcataccgcgcaatcagttgccgagtgcggagctcccgagatcggctactttttttcccttgactcacgaggcttgactcacaagagcagcatcttcccttataaaccccgggcctgtgtctaccaattgccctatacaagacacacatggttctaactacccaatccgccagcatggcgacctccctcgcccgcatgctcaagggccaggtccgatgctactccgcaccgctggacatggccattccagcctccaaacagcgctacatccccacgaccggcacatacccccagggcttccaggtatctggtacccatgtgggcgtgaaggcctccaacacccgcttcccagatctggcactgatcgcctccgatacgccatgctcagccgcggcagtgttcacaaccaacaagttccaggctgcgccagtgcaagtcagcagaaagaccctgcagagccgcaaaggcgatggtatccgagctgttgtgatcaactcaggctgcgccaatgccgttactggcaagggcggcctagaggacgcagtgcagatggggaggaaagtagacgagtgcagcggtgtcgagaacgacagctctctagtaatgagcaccggtgtcatcggacaacggtaaatgcaccactccatctcaattgcttcacaacttacccgaagaaaccccccataactaaccaacaacccacccacccagcctcccgatctccaagatcctcgaccgcatcccaacagcgcactcaaccctcgcctcaacacacgaagcctggctcaacacagcccgtgcaatctgcaccacagacaccttccccaagctcctctcgcgcaccttcaccctcccctcctccccagaccgcagctaccgcctcgcaggcatgaccaaaggcgccggcatgatccatccgaacatggcgactctgctcggcgtactctgcacagacgcggcggtcgaacccgcagccctgcaatcgatcctgaaacacgccgtgtcgcgatccttcaactcgatctccattgacggcgacacgagtacaaacgacacgatcgcggtgctggcgaacggcgctgcaggcggcgagaccgtgcgtgcgccgggcgcgtctgccagcgcggactacaccgcgctgcagggtgttgtgactgatttcgcgcaggagctgtcacagctggttgtgcgggacggagagggcgctactaagtttgttactgtgcgtgtgcgcaactcgccggattatgaatctgggcgcatgattgcttcgacgattgcgcgttcgccgctggttaagacggctctctatggtaaggatgctaactggggtcggattctctgtgcggtgggttatacgcagggtgtggctgaggggactgttgttcctgagcggacctctgttagcttccgtccggttgatggaagtgaggttttgaagttgttggttaatggtgagcctgagactgttgatgagcagcgggccagtgttattctgcagaatgaggatcttgagatcgaggttgatcttggtggaggtgaacagggcgctgctggatgcggtggtgaggatgctgtttactggttctgtgatttcagtcacgagtatgtgactatcaacggtgattaccgcacttaaaaatagatgtattccagcatttgcagtggacattatcgaatcgagggagatttcgggattaaaggcctttggaagtgagaatgcctatatttacgaagaagagccgttgaaatgagcatgtataaatatgaacgatattgaggatcacggcaagttgaatatatgattttggttttttctagacacatatggttacaagaccctaaacagggcacttttaatcgctgagcaccgtctatcgagtgagattagacccatatgattctacacatggacgacataagacgttgacacatttgtgtcgacgtgcagagactcctagataggggacctcgggacgttcatcggcaagttaatcaacccgcacgactggatatcaatcggtatagttccaattcagccaaacagacggcgctgatccattcacccaaaaagtataacgtagaacggacagggaaaaaaaaaaacgacagaaaagtaaacagagaggttgcaaaggaccggtgtgatcctatgtcatgctgctcgtgaaattacggacagtctcgtttagctgccggggacgaggcccttgaggccagcgccaatgtcaccctcacgggcggcaatttcaaagtagccgtagatgatgctgtattaagctgttagctgagatgaacatatttgagatgtcaaacgggataacttacgtaacggcaagaagaataccagtaccactgccgagagcacccataaggtcggaggcgacggacaggccaccaatgcaggcaccaccgaaagcagcggcagtagggataacgcgcttcagctccttgtacatgctctgctcacggtgaccagacatgacaagaccctggtccttgagctgcttagcaacgtcgcggggagcggagccggaaacctcaatccaggtcttggagaagagagcgcaggcaacaagcatgaaggtaatgtagacagcggtgtggatggggtcgagaagagcctccttgaagttgagaggaggtgacatgtagtaagcaataccagaggcggcgtaaagctgagcagatccctcacggggctcccaaactccaaggagctggaccaggatgttctcagagaagcgagagtacagcatctgactgatgaggaagatgttggagcacagcgcggactggagcatgatgggcatgttggaggtgtagaagaggcggacggggtacgagccgcgcatgccacgctggcgggaggacttgacggggatctcaacacggaagccctgcaggtagatgacagcggcgaagaccagaagagtagccaggaggttcatgacgttgggcaggttctggcggtagaacgcctcgtacagggcgcgctgcttatcgggccaggtcaggagaaggtggaacagagcgatgatagcaccctcgaactcggggccacggccggtgttgatggtggtgggggagaaagccttccagacaatggactcgcaaatgttggtggcaatgaacagggagataccgctgcccagaccgtagcccttctggaggagctcgtcaagcagaatgacgacgagaccggccacaacgagctggacaatcaggagaacacagataccggcaccgaggtcactgggctggccgtagagaccagtcaggacgtaaacacaggcctggccgaatgagagaatgatagcgaagagcttctgggcggtctggtagagctcgcggtcggtcttcaagtcgaggttgacatcaatgaggtgggtaccggcaaggagctggagaacaagttgtgtcaatataattatcgcaaatggtgataggagaaagttgtgaatcgcatacctggaagaccatgccggaggagataataggggtgatacccagctccatcagagtaccccggttactggccagcatcatacggagccagtacagggggtccgaagtgtcggaggagacaataccgtaaagaggcatctgactcatgaccaggaagatcatcaaagtcaactgtaatatgtttcaattaggattcaagccgacttcgcgcggagacagcggattcagggcgacatacaccagtccacatcaacttctggttgaagggcaccttggtctcaggagctgccacctccgggaggaggggcgtaaagggcttgatcaagtcaaggaagcgtactatagtcctccatcagcatttgaccatcaattgagggtgattcgacacggattgttgcgattgcgtgcgcgacgaggattcggggaactcacggccgctcatggtggctatcttcctcccagtccgttaaagaatcaaagaaagctggagtcgaaaaccagctaaaggaatggaaaatattaagagaaataaaacaaaaggagaaggaagtgaagttgtcgagaagatggggggaggagggaagaagaagacagaagaggttcgctggccacttttcgcttccgcgctaattaaggccacttggtcttcgccgcaacaaccaacttggtgactcaaccagcacaagaacgggatatttggaggtaattgcacggtatgagctctaatatgagctccaattcaatcgtccagaatcgttttttttttctgctagtctttcaagtccgacgtgtgcaccccaaaaaggagggctccaagctatccccacactccagaggccacggtactaactacgcgatcggagggtctacaacatatggggtaattattgggaataatattggtatccatgtccaaataaaatattcctactttcgtcctttaaatatataccagcattctataaagagtataatatggccaaaagaaaatctttcaaggtccaacgagacccaggcaatcatcaatgaccacctcaagctctcctaatcgtgtcttcaggccccggttctcgtcttgcaggacacccatgacactccaggcctcggaagcgggcacgccgtagcagttgctgcaattagacgcgttgccgttaccaccagtgaaagagctacctaaacgagttgaagcaaggcccttcaacacccggtcatatgccgatgagcgtgcaggcggtgttgcacttgtgacggcgaccaggttcttttggattgtaggtgttggcatcgggcccgtcggcgtagatagggcgatctgcgacatgttgggagacggtgctgtcagcgtggacgtgggagactcgacaccctcacgctgcgagaagacgctatcggcaacgctctcgtccccggactcaaatcccgagtcactagtgaaggtgctatggctagcacgttttcctccgcgccgaggagtttggagcgccatggaaggctcgtcgtcatctggatgcacggtacgaattgcacaactgcgactgcgggattcttccgcctttcgcacctgtctctcttgctccaattcctcggccatggcctgcatggctttctcttgatcaagcaccttggcggccatgccgtccagctgcatcttgaggtggtcgactctggcgcgagtctcttcgagctcctcctgcttttcgttcttctctgccaaggcctggtgcatggcgaaggtccgctgcttataggcatcctgcatgcgtcgtagcaccttgtcggcgtgatctcgtagggcatccagcgcctcatcgttgggatcgtccaactctggtagtgaaagagcagcagtgatgtccagattcaggaactcatcgtctgctggttctggaaagttgggcctgctcggttgtcgccgcaggccgaagaatgaaaaccgattcgttggggttgagttctgcctcgtatgtgacatggatggtggagctggacgggaatctaatccggtcacgtctgaagcactgttaggccccattttcagccccaactcgactggatcagatttcccctggaaccaatctgacaagatcctggctcttgcttcaagcttcttcttggggaaggtttccgtccagggggtattcttcggacctgatatcgcgtcgtcgatgccctgttcaaatagtggaggtcttgcaatatattccgtgtttgcccgacgatgtgaagacggattgttaaagtgatttgaggttagacggaccgacgatcctgggggtgtcaaggcaacggtctcgtgaggttgagtgccatcggaatgcagggtgacaggtacatgggagagatcggtagacatgttctgaggggttatttcgacagcacaagcaggcaggatagaaatgccacgtcgattcaggcccaatatggcgtgtgcaacctggggtatctgtagggggagaggtatgaaggctaatcaaggacgaaacagacccctggatggtattcaaggtcaaatgaaaaagggtataggtagtttcagtgaagtatttcgtgtttcacagtgttgagtctttcgtttttccagaattcgaaaccaaaacaccgaaaaataatttgacaggaaaacaagaggctggggtgatggaaatagcggtggctgaacaggagctctctccacctccaagatccaccacatcttcctttccaatctgattaattacacggactcccaaattagcgcctctaggcttctttcgagttcgatatcgtcaattttcccgctcccgctgtgcatggtttcagctgcacgaggatctgcgtcattgcacgttttctgcaacctcccagcgtcatggctcccaacggtctgaagcatttatccaatgccctggcaacgccagaccaactgtccaactcttcatcctcaatcgacaatgtcccgtctgatctcgaaacctccattcgttgtgcgggcgcacagctcactcaggctgccggaattctcctacacctgtcacaggacgtaattgcccaagcgatcgtgatcttcacgcgtttttggcttggcgctgatgggggtagcttgcgaatctactccgtcaaggtaagaagagttcgaggaattctaaattggccttctgatccactaaccagagtaggatgtatctgccgcggccttgtacctaacagctaagctttcctttcaaccgacctccccacgctccgtcctgaatgtctacacattcctcctatcgcaagatgcatcgcccttgtggtttgtgagacagagcggggctcctggaagccccccatcgcccgagacctatatcctgtccgagggaggttaccagtccgcccggctagtcctcctccgcaccgaaacggttatcctccgtattctcggctttgatacacatgtcgctctaccacatacgattgctttgacgtatcttcaaaccttgggtgtcacaaagcccgctgtggctcaacgtatcattcagcacctcaatgcggcgctgctctcaccccagctcctttatgtcacccaccaaccaaatgccctggctgtggctgccatttacctcgcttcacgcgaggaggaggtcaagcttgtggatggcgagtggtgggaagtctttgatgttgatcgcgaagagctcggctttttggtcgtcggcatgaaaagcacagaaggctttatgcgggcggaggtcagtcggtggaagaacagagctattccaatggtagtagatgaggtggatgccgaaattgagcgacggcgaatgatggaggagggcgaatgaacattctttgacttttgctgagaacatcagatttcaagatcaaaagcctactgggaaggatgttctggtagaagctacccagctatctaccaaataatataccgcaggatcgcaggaacgccctatcagcagaaggcctcacggctgaagacttcgcgagatcccggtccgcacccagaaggaattctcgcaacacccgacaatagacggcctcgtctctgcaagtgtggccgaatatgccaccagaagattggctgttccacggatttggccaatcaccagtgaattccgcggcctgtccagctgaacctatatgttacatactatagcctctctcatggctgtaacatcaaagtagatgtatgaatgctatttcagaactcaagtgcaagatcgctaggtaaaattctggtgataaatgaacgacataaatgcttccatcctactccatatgctccgcccgagaaacaccctcgacaggctggtgattttgtcctccaatatgcgcaccacattcaggacatttcgctagctccatcggcataccacattcgccaatagcaaactgaagaaagaacagaaaaggttagctatgtatgtctctaggaagaagatctccaatattccgcaaattcaactcaccggatgtccgttgatacaattgtaccaatgcccagagttagttgctatgcctcctcgcccgccaaccatggcaatcttgatggacgcaagttcctctggcgtaatctcctcatatcgatcctcttcaaagagacgattcatttcctgaactttctctcgaagttcctcacaattgcccaattgatcgcataaatgcaaggcatcggcaaggaactcacgcgccatattcctgcggttatcacgcgattctaaccccgtactcgcccgtcttttcatatcagtctcatcctttccgcgtactggacgtgtgcgattgtaccatccgagcagttcggatattttggcaaatgcgagggttgccgtgatgacaatacgggagaggctcccacccttggcttggatgatcaagtcttggcagtcctccaggaacggtatcgtgagctgattaagctgaacagtgaggattgtctcctcaaccttcgcgtttgaattcaagagtctgaacttatcgtgaagaacgaactctcgggccctgatagagatcaatcgtgccctaagagttatctggttgtcaggtctcggcgtggatattgtcagtcttccaagctggctggagacggtggtagcttcttcatctgatgatttctgacgcaaagcgatagcatccttgagccgcttggccggttgatgccctgtgtccatcattttactgaggactgcagcttctttcgcaagctggacgaaggccctatatctagtgttaatctgcgctttagtaaggctaattggcctcgccgttgtgtctttggcaacaatcgcatctgcgagggtattcagacgggaatcaagggcttccaggtcgatgcgtcctttggttaagaatcgcttgcatgtttcgtccataacagctcgattgatgacacggttgtagcgttttgttacaaactgacgaatgggctgcttgcaatcagggcacgatggtatggtactagcaagagaagcagagacatcccgaaggccgtcgaacttgccagatctgtcccttgtgtacacttcatctaagcggacaagaccatcgaccgactcactggtaaagaaatggccgcagccgagcacgacaattggactctcgtcgaggttgatttcagaataacatttccattcaaggaagtcgacacgagcgtctggcttgtcaccgcattcttgacacaggccacttggacagtcttctccgcaaagactcgggcactgatgaccgcaatcgaggactttcgtgcatcgctcatcgcacggaagtcgatcacacggtgctgcacatggcattgagtaggaaccttagtgaggacaaacccaagtgcatgtctcgatacaaggtgcacatgcctttccgcaggtggaggcacaagttgagtgtgagcatcgaacctttttggtgttagcatgatataggaatagccagggatgtaaataagagaaatagaggaatctaagctcacctcgcatttggcttcacaattcccacagccttcgccatcatgacataccttggggcacctatggttacagataccaagtggacgatcacatttctttgtgcatgtcggatgctcaaacgacactacaccgttttcaccttccttcaagcacttcccacagacacctccacaattgtgaccacatccgagaatttcggtgtatggctccgtgcaactaaaaatctcagacgtaacgtcaacaaagcaggcaagacggagaacatagccacacttggtaatgaccttgtccactttcacgtcgcacttaatcgacgctagattatgcatctgatggcacataagcttctttttaacatggccacaaggaagcgtcacgtcgcggatttcaaccatacaaagaccacactcttcaccacagagcttaggacatacatggtcacaggtcttccgaattcgagaacaaggcttacaacatacaaagccatagtgcatgaacgatgaatgacattttgcctggcaccggtggccacatggctcgagacgacgggtgcataggatattacatccaccttcggggctcttcgtctcgaactcatgaggctcagagcagaggatagatatttcggggtggcgggggcagcatagggccagttatgtacccactgcgttcgttcgtgtgagctgagcgtgaatatcagcccacattgggacattgaggtaggtctcggaattcccgatcaggtatatcccgtactgtgctcgactgaggagcatattgatacggttctcggtgcgaagaaagccgacttttcgttctaagttgctccgaacaagggagacgataatcactttcgcctcttcgccctagaaattatcaacggtagcaagacgcagcgtctgaaggagcgttttcctctcaatggtcttacgaggtcctacttaaggtgtctcttccgtatccaagccgagcccctcggctgctaaggcctccaaatcccgctcgctaagacatatttcgaaatctttgctcagcgataccctaagcttccgcagttgaccggtgtagggagtcagaaaagcaatgtcattgctgctgtactctccctgtcggacaagatgccgcacaagagcggtcgccatgtcaacctcccaccgattgctatgcgatttcacacgtatatcatcttcgctcgtgtcttcatcgcgtcgatggtccagccagaagacattctctcgcattccgacgacgttaggtacgttcataacgcttttataatcttcaagctttggatagacacttcgaatcagttgcgaaatctcgggcctcattcttcgctatacatagagttgtgcaacaggggcaggattgagccccggctcgccaacagcacgtctctcaaattggctccgatccagctgccaggctttcccggatgacgactcaaggctaagcgagtaattttgaatctgcggccgtagctgccggtgatcgccaatctggatgaagtgctccacgcctggcataagggatgagattacatgtgcctccatcacctcggctgcctcttcgcatataatgactcttgctcctatgcggcgcaatgtctcgatatttcgcgcaagggatgtcgtcgtgatgcctacaacgtcggcttgaatcagagctcgtcggtttatttcttcatggacggcgtgtatgttttcacgcgaacgctcagcgctattgatagcctcaaacagtgaggcactctcttctttgcaccactgcttaaaccagctctttgcaagagtttggcgttctgacttcgagaggtgatagatatttcgctcggcagagcgtgtcaggcgtgccaagcgctcatcgggctcatccacatcctcagttttcgagcaattcaacgatttgactcccagccagttcaagaggggatcttcaatgaccagtttgtatccctcgtcatccatcaggtccaattgtctgtgtatggcgggccacttccggcgcaaaaagtgctgcatccctttccaggtcgggccctttcgagactggtgcagaggcttcatggaatagccggctattttcatgcattcctcaaggtcgctgtaggtttgtccgagtgtttgagactctactcttgtctttctgatgccgccgctaacaacgcgaaggttctttccttccagctcagtagcctgactgcggccgccaattcgtatgatcttctggatatcaatggcaagaaggtgcttcaagaattggtccaaggcatggttcgtgtagcacctgtcgttgaggttagccatatgatcgacggttatacatagaaaagccgctttccaaaagcgagcctttttggcccttttctgctgtctacccgacaaactgacaagaccgacggactacggccgcataaacggccgactgtttaggccattcaagatgtgtagaacaagaaatacttacatcacgatgattggccccaaattcgcgcttgctttgatggcgaggagaacctggacaagcttgacaccaacatgggattttcccgtgccaggtggcccttggatcatggcatattcccgcgtgagagcagcaacaagtccctgacactggccgcggtcgagaccagtcaaaactcccagctcttcgagttcaagagactccgggaaattgggatctaacttgatatctcgggctcgatctttattgattgaaaggaagggataagcaaatcctagctttcgggcatatgccggtggaggtatatcggtactccccttatccccattctggcctggcaaaatcaatttctggaatgccaactccccttcacgctgaacacgctgtaggttcttaagaatcgggacaaatgttgcaggaatgaggccatggaagtcaaccagtgttcctgggattttctcgctgtaaatttggccgaggagatccagttcttgctgtgaacatgtcgcgagcttcactgtaatgctgggcggatgccgattggagacaagggtactttcttgtttctcttgctcttgcgaggaacacttgactgtgacttcgagaaaaagcagtctttttcgggacccttcagaagtcaagaagcacaccagcgtccctacctctagtcggttagagtctttccaccatctggactgctcggcaagaggctttttgcgtagttggggtggtacagagaaggatactgttgcttcaagctcgtttctcccattaacgaagacatgctggacatgtgatgtcatgtagatatgcgccctggtatccttgtttgatagcttgggatttgggccaccttgccgcagtagatctcggagtacatccttaacagagccgaagatatcgtggcgcagaagccggaacgtggagtcaatgtatctcagcgtaggatctgcaatgaagtgcggctgagcaaagttggtggatggtagatattccgaatagtcactgacgatctctccctgtgtcggaagaatttgaatctctgagatttctgcaaggtcgttgtcatgtctgccaccaggaatttccatgtccattggaaatgtcgattgagctagtcgagtgctagtccttgaaacgctttcttcgggtactgtgggtggaacaagaccgcggagtgcgcttgctaccacatttcgcatgatttcgatcctgttgtcaagcgcctcgacgtcggccttggagcagactttggtcatcttgtggaccaattcgtacaatgagccgagaagtgcagtaaggtcatcatggaagcgtgcccgtcggaccctgtacagaagctgatacagggcactcaacagcaacttcaccatgtctggagtaacgagagtctgattgttgctgttttgctcaaagctgtttatcatgcagtgacaaacgctttccaaaaacccgattgctcgatctccattcgggccaccaaaggttgcgtacatagtgccaacaaatgaatcaacagagagacaatccaaaagggaagggtgggtaataactttgaaaaatggctcaacatagacaggaatatggcgatttgagtcgtggccggttgtatcgatagttgccagtatgaacccgtgtccatcaagattgtcatccacgaggtctctaacaaggaactgttggtcccctgtattgtcactgtcaagtatttcaatcgcccctgcccatagttgaagaatctcttctggtcctctctgagatctgacaccgatgaaattccttctcaggatcttcttccagtccaagtatcgtttccgggccgaaccatcagttgtaggatcaggctcagatccactagctcttgccgggtcatgagagaacttgcaagtcgagccgtaggtacaatttccacgctgaaattgcttgcagattttgtcgctttggttacgggttccgaagctgttcgacctgtctggattgctggtatggccttggccgcgcaatcgccggtttccacggccagccatgattgtataggcaaaataaaccttcagctagtgtatccaattacaatatgcttcgtcgtgtcagcataactccagcaaatgaagaaaatatatctctaagagaagtggttggctgaccggatgatcccaaagtaggtgatttgagcgagtagggaaaaggaaggcagttgatttcctaggaaattaagtagctggcaatgtaattataggcaataaaattcctgacaaacaatccgtagttgcaaatagcaaacaccaatatgcaccgcgcctagaatactcaaattatctgctgagcgacggtgaagactgacaattacactcatccccagcctacttcatgtatgcatataaggtaggatatagcaccgagaactaaaggctaaggatgctatagaatatgaaagccctataagttgacgtatagtacatagagaaattcatctgtaagaagagccaggaatttatacagactagaagtacaagaatcctcacgtatcttattcaaatatagcaggttgcaatatggatctcaaactacaatcttgcttgaagaagttgagatatgttgctttgaacaactttttctgatcaaaaaggatcattgtcttggtataataatcggtagagatggagatggcgtttgctctccttctattagggcagatacattagatagcccttcgtacctgatacagacctttttatatgcccaagccatgacttttcttctggcaaaaataaataaatatttctgagaaaatggaaggatgttgagctagaatagtttactagttaactccagatcacctgggctcgggaaaataacgttcttatataagcaggtaccgtcacgtggatatcagttcaaaatgacgctcacccgtggacgcggggcggatcatgtgctccaccgcttatcatttacccccgccgcttctttcgcatctctctcttcactttcacctgtgaaacactatgaatatcctacactctacactgtcaacctggcgggaccgcctggccccggtatcacgcacgtccaccttccgcaacaccggccaaatcaccccagaggagtttgttctcgccggagattatctagtctacaagttccccacatggtcatgggccgacgcatcaagtccggcaaaacgtgtatcctaccttccagacggcaagcagtttttggtcactcgcggagtgccatgtcatcggaggctgaatgacaattttgccggagatgcagggctcgaggatgagatcgtgagggatttcctctcgggcggcgacggcggtgaaggcacagtggccgacgatggggaggatggatggttgcggactggtggcggtcgcgacgctggagcagaccatgataaacaagaagctcggattcgtgacgtgcggaccgtcgatgaatctggaaatctgggcgagcaggaggaggatgatgacatccccgatatggaggatgaagacgatgatgaggaagccatcatccgagagacagatgatcagtcagggacaccgtgagtaccgttttcctgtcttcaaacttcaccttgccctcttttctaacccgtggcttgctatcggtccagatctctccgcacttacaccctctacattacctactctaacttctaccgcacgccccggctctacctgtccggctatttgtcgccatccgaaccgcttccgccacatctgatgatggaggatatcgtcggcgactacaaagacaagaccgtgacgttagaggacttcccgtggttcgagggcagcgtcaagatggccagtgtacacccatgccgccatgcctctgtgatgaagacacttttggatcgtgccgatgccgcgctcaagctccgccgcgacaagctcaagcagacgcagtcacgcgacgaagcggaccgcgttcttcgggcaggcggcggattggaaggcctggtggatgagacgaagaatatgtcgctcggggactcccaccacgcacagcctggcggggacgagtgggaaatgctgcaacgcgatgaggaagaacaggtcgctatccgggtagaccagtacctagttgtgttcctcaagttcattgccagtgtgacgccgggcattgagcacgactttacgatgggggtatagtttcttttaatgggatccagactcgtcttatccgatccttactttccagaaagctatacttttttttttggagaaattggactggggagtggctaggatctggcgtgctgctcccttgttcttgattttcgaaatgtgatatgcatgacatgatatgagtttggcgttaatctgcttttgggagcacggataatctcctttccccctttctgggttgcttttgctgtgtattatcttcgttagctttgggagttttcccatggcaattttactacgatctgtgaagattcctgagtaggcatcttgcaaagcgagataataacagagcccttgcatttttgaagtaagcccaagggacgaaagttgaactaataaggataggaaatagaaaaggccgatatatcaaatagatacatgtatggatgtttgtattgagatgggggcaaggctttgtttctgtatgaccattcttagtactcaggttcagtataatctcaaaagttatatacatgtataggaagtccgtttcacaagttaagcctcctgccgccgttttctgcataccagatatctaaatagaccaaccgagactactcaaaaaggcatacctaagacatataaaaagactaaaaagacttgtcggagaggagcacctggatagaccaccaagactacggccatacaagcggccgactatatagtctcaaagcggaaggtatacgagtgtgttcctattaaggtacgtgataccggtgttgggcatgaattgaacatcaatggtcgtcgggccaaaagttcctcaccagccttgcgtttagtcccagttataactggcgaacggacttcagcaaggtcagaacggacaacatccttatagtgtcaatcttgtaccatgacattccactaacgtacaatctcagtccagtttccgatgatcaacttgtggtttcctgcctgttcgatatcccaatgaagtttcacttgcactgcaaggtttacccaggcttgtgtcaggtactattgtcctcgtgcagtcgaccgcagataatcgataacctttgatacccaatagaacacagtgttaaatttagacatatcgaacgcagaggagaagtattgaaataggtcctctggtttttgcttcacagcgagtggtgctggagtccgtttggtatactcgatttccttgttgatttgtgtcttttagagttagcatttccatttcatctagatatcattgtttattattttaccttcatcctttgcaaagactcggatttccaggatctgcatgtgtctcggacatataaaaggctgctgttgaactcaaatgagttcttatttgcatgtggcaaaacttcggcaacaacttcttcaatcttgtccgtattgaagtgaagagcgtagattcatatagaatgactgtaataattgcgtgagatgatattttgctcatgattccgttggaacacttactttggtctgtaatgagtttggacctggcccaaacgttagaggtacacggactgtctgtaccgtgtactcgaaacatgaagctattcagagcctcatttccccatgcaaatgagtatatgcggtccgtgtgtagcgttgaggttgtgtgacaccgttattggctcgtgaaagtaactatggttcggatagatattgcggggaagtttctttgtgatgatgacgttggcttgttgcctcggacgttcagttccctgaatgtcccgggtgtctccatataacagttggcatctttactggccttccgaattgtcgtagaactttcaggagttgcataactgttgacatgcagtgcatgcagggtatgcgtttgtctctctgtgtgcagactgagctctttgagcctttgtctagcttggtctgtttgtcatatatcgctggcttatataccagcttctttccatagtttcatcagcacctcacttcttcttcatctatctctctctctccgtagcctcaacaaataacctcatcgctgtcttcaggagtatgaccgtatcttcctttctggagccagagacggatatgtgcgttcaactctcgtataacaagtcttgcaaaccagtggcggagagggataagattgacccagaggtctggagcttctttgctgttcacaagtgccgacacaggttgatgttgtaaatcttcgaatttcacgaactctggtgctttgatttggtcaccaattgggctaagggggagtctgtgaagtcgaatagtgatcgcatcatgaggcgcttgaatatgtacaagcatttctccccactggaactattgaatttaacttaatagaacataatagaacttgaaaatcaacagtatatcaaaataatatattccaattgagagtaatatcaaaaacaagtaacaataaaccacataagaactccgaatagtgcaaagcacgcgtggacgcccaaagtgaacaaattggacaaccatccgcagtagctggacaagagccaaaaagcatgataagtaaaaggtcggctctcactgagcatagaagatacatgtaatctggggtgagtacaccagccgacgtagacaaattataaaaagaagagaaagcaaagaatacagatgtaaaaaagcaggagatacacaggtccggacaatcattagatagaccatgtcgctgacgatggtctatccgggtcattttcgccattctttatcgtgttcggtaaatgccacagcagctttagttgaagaaagccaagataacgggaagagccactacaaggacggaaccaggaagcagggcggagccggcgttgaagacgggctggacaggcgcagaaggcacggaggaaggcgaggccgatgcggtgggcgcgggacggtggatcagaggggtggaggagggggcccaagcgggcggggcggtggtgagtggaacggagatgggggtggtgaaggtggcaggagggacgatcgtagggacggtccaggtaggagggtgggcagtctcaacggggggaataacagtctcaacggggggagggatgaccgtggtggtagtgggcacgacaatgggaggctcggggcaaggatagccgtcctcgtggtggtgcatgccattgccgacgttgacgctgggcccgccggggataccgacgttgacgccggcgccggcggcttggtcagagcctgagcctgggccgcaggggccgcggtgggactcgtggaatccggcgccggcgttcacgaagggaccgcctgggatgccgacgttgacgccgctgccggcggaggtctcgctgttgcctgggccgtggttggtggtctcgggggcctggttcatcatttccgggaatgggagagcgggcagctggggagcggagagcacgttggcagggccgagagcaaggaccaggcacatgaggccggagaagttgatagtagtggagaccattgttgcggtagtttggtttgatttgttggtttggaagtaggaagatggatgttgattaaataaatccgaagattgaaaatgtcaagttggtaaagtggttgaaagagagttgagaaagagagagaaagcgaatgactgtttagagactgtgatgcttgatgaagaacggaagactaggcgtgagcagggacccttatgtactttttggcctccaagcagagtatacacttgaaaagtatggggatagagagccaagggctctatccaggaccagataggaccagatggggatatttctgcaaggcacgaactaatgcttggtggcactcatctaaaaaagccacaagggcagtgatctgcaaggtacaaagtcaacggccgccgagaaaggaaatcatgagagacatcaggtcttagggggcctggaaccaagtcattggaggtcattggaaattagcaagcagcatggttcgatagtcaggacctgcaggtctgtcgagagacccgatatgccctgggcagcgtaaagcttatgcacgagctctaccccgagcttctgagctgtacaattgtagtagctcatgtaggacaggataattccattatgcagatggagtttggagaatacgaaaacacgtgcatggggaagaaaggtacctaataggtatagatgcaagggataagccaataaagcacagaaacattaactgcaggagacttgccaaggaaccaatcagggtatgggattaaaattgaatgcatatacatcacacgcaaggaacaggtgagtccaaatgcaacttgcgactgttgtcaagtcaaacctcaaaaacgcagactgcaaaagaaaatccgagacaattggaaataaatgaggttatattgcacatatcaccatagatcataatctcataaggtatatcgccaaaaaggagcaagaagatataaaaaaaaagttacagcatcaaaagcatatactccatgaaaagaggaaacaccaagagatccaaaatagacatgggatctatcacacatcacaaagatccaagcgtagatgtatgtcaaatgtgtgcttccttagacatgactcgagttcgatattccaaatgcagtgccaaaattagtagatttcttgaatttgatttcaggttcttcctcttcgcgagggaactcagactcaggatcagtctcattaggatcagccgattcacccgagcccagaatatttttcgcctgatcaaggagtttctgatcgagttcattcaaaaaattggagtcgtgctcctcatcattgatcagaccgagaggcccctggagagcgggatcgtctggcacatccggaaagtaggagatctcattttcggaaggttgatgaacgttcgtcgccacgggcgcaaatggagtctcctcaacctgggaggcaacctcgaggggggtcccctcctgggtggaccgtcgactatcatcaacgtcgatgatcgccatcggggtgtgacctgcatggcggagcaagttctcattgggcgggccgagctctgacagcttcaatttgagactgtttcggtgttcgatgggccttgcagcggttgaaggggcagtgtcagggggggttaccaggggcgacggggagggcggagtgatcacacgagctaccacggccggtggcagcgccgtggacttgagcgtgatgccatccagcgtgctgtcgagtctttcgatcggcaccgggtgactcggcgctgcagagcggtctacttgtcgcgactggggggaaagggcccgatcaagggatggcgggtttccattttcagagatcggcgatagatagctttggtctggagattcatgatcggagaatactcttgttggtcgactgtctggacttgtcccctcccacacctgagctgcgaagcgatttgtgttatattgcgatattccacctgcaagcacaagcttggccgcttcagatcccaattgatttgttctgctcccttgacccctcactaactcctccaactcggcaattttcgatcgcaatagcgcccgctctttctcccacaactgtcgctcctgcgcgaacaattccctctccgtctcaaaattcagccgttggctctggagaagcgcccgcgattggtcgatataggaagtatccatggcgaacgaattcacccgcgccgagtcctggaatgcggttcggccgtagcctgatatgacaggagggaatgtggctgaaacggattttgtgcgacggataggggtttcggtcggagagaagcgtacttctttgtagagacttccgtggccgtctagtaatttggtagtcttcattgtgtccgaaatgtgtttttctcacgatgagcgcaaatcggcagataaggatctattagggaatagacgtggacatgcacgatagtagcgtggacgatagtaacacgataatcacaatcgtgcccaacctgcaacgcctttcccacgttgaccagtggagttcctagaagcggtcaatgagctcagagcactccgacggaaattcatgcgaggttcccaatatggcacatgtcaggccttgggtcacgtccgtagattaagatggtttgggtagatttaggatttgggtagctttcaggtacgaaattcccagatataagtaagaaaagatgaatagactgactcatgaaccccacaaattccggggaaatggaggttacagtggaaaagaaggcaaccagcgaagacagtcaacggatccgaccaccgcttatgacgtcaaatggactctaataggaaatgtcattaataaggtgggagatccaggtctaccttgtcgtttatatatattgtttaaaggatcaaataggggagtgagagtgaagtaaacatttcactccaaaatgtcagatatatatatatattgcagagggcaagagcggtatgagggccatcctatttatgtacttgtaagatcagcaacaaagaaaattcaaggtcagattctattgaggtcagtttattagactgtttgaaatgagaaaagtgatttgtattaactcgaggccatctatgtgtgtacatatgtaagtataatatcaacaagcgcagtatatccgtaaatgtatgcccagaattcgccccctgtgctgaaatagtaaaataaacgtggaagaatggagaaattgaaaaacgccatttgcgccatatgccacattcgacctttaacatgcagttgaccagtataatccgcgctcagacgtcatggcgcagggctagcagagctagtgaaaacaccaagtcaagaatcgaggtgaatgctaaaagatgtcaaatcaagaaccaaaaattcaaaaggatatataggaaaaaaagaaacaagggcaaaaaaaagggaaatcagcaaatagacgaggcggactgtagtcgacttggaaccaatttcttcttgaaatccaaagaccaagccgaacaccccttaatagaccgattatcctgtctcatcggcgaccgactccgccaaacaaactgctgcgcctcatcaagcaaatgctgatccccattcggcaacggatagaaactaacgtccttacacaacgcgccgaagcgcgtagcaagatcaaacactccccgagccgtaaggtccctcccgcccacattcgccgacggataataataccgcggatcgaggtaaagcaacacactattccagcggggaagtttctccgacagaagccgggccgcggtttcgtattgtttgagcgtgcgcttcggcacgccggtctgcgtgtgcacgaagaagaagacctcgaagccgacgctgcggatgcgggcgcgggcggttgcgctgagcgtgtcgaggaagtcggctagtcggtcgagattgaaggagttgcggaggaagagcgtgtgtgttgagtagaggtagtcttcggcttcgtcgtggagttgtcggttcaccgctagtaacttgcgtgcggtgccgtcttcgccgacccagtgtggactcattgataaggcgcggtattggccgcgggatgtgaaggtgttgccgtgatcgcctagtacgatcattggtttgctgactagatactcgtttgggacgtcgagtgcatattcgtagatcttgagacggagttcggctgggagttggagaagccgggatggtggtattgatggagtgaggttcgtcatatctgcttagaaccttagaagaatgagcaatagatgaattcgagctttgcgaaatgcggctgttaatcccgtttgaatggtggtaccactcgggtgtatacgctatagatgtgtcgccaccgtcagaaatttttttttgatcggaaaaagtcaaacaaaaatagagatctgtacaccgtacttcgatgataagatgcatcagaccatgaccccttatatgaaatgccgagacactctcggcattgtccaggccgatatacttcgccgggtgttaaagttcggcgaatgttcaaagtggtttattaggtctctacatgtagttatctagttatatacgtaggtacatacagggctgttcctggatttctgaaccatggatacatttgcaaagtttttatataaccttgaaatccttaaatgggctgatgatccttgaccctgttgacccacgtattagtggagccgatgagtttttacttcagaactatgtattggacaaggagaaatggagaaatctcaacgccaagtaccgtccaggaccttgcaaatgtacacgtgtaatctattggcccaagtatgctgttcttggacaacatgccatgggcgcatctgtcgactgttgagtgtaaggagtgttgcaaacgtggcattttaacattccaacccagaactatatcggaaatccattgaatcacccactacggccaagtcaaaaaagccgagtgcccaaaagatcaagacgcaatatatttgctatagaaaactgttcgaaaataccatggacaatcaagttccaaacccgatcatcgctgtctatagacacccagcgaccaagctgcccgcagaacagccaggccccaagccatgccaatactgtctcgcaagacattcaacttgctacccttaacctccctccaacccacaggcacctcagccacagggatccgagcgaactcagccagcatgagcatctcaacgtcgaagatccagccctcggaatgcatgtacggcacaatataaggcaacgcactacgcgagaacagcttgaacccgcactgcgtatccttgacagtagccgttttaggaggcgtcatgagccacaggatcagatggaacgagtgcatcaagaagttccgaagcttggatcgctatcgagcaagtcagtaatccacgcaaaacatcccactcagacatcaaatatcataccttaaccacagcctcgctgccaaccatatgcgcccgcgatccaacagcaaccgccctccccttcgcatcctccacatcccgacaagccccaacaagcttccccagatcctcgaacttgctcgctccatccgcgtccgcaaagacaacatactgcccacggacatggcgcataccgtgcgtgaccgcgccgcccttgccgcggttatgggtcaagttcacgacgcggatcgtgccaggcgggatatggacgccctccgcagcctgtggtgtccacggacccgcgtgtcccttgggatgcagagagagctggtggtcgcgcgcgaaccggaatgcgacatcctccgtgcggtctgtcgagccgtccgagacgaggatgatctcccagccgcggtctgaggccgggcctgcggcgtcgctggtggtatctccgttcggcttgcgtttgcgcatcgagcgcgtttcccttgttcctgcgctggagttggcgatggcgctggctgtatccccgtacatgtgctccaggtagttgacggcttcttccagcatgccggttaaccggtcttcctcgttgtaggctggtacgacgacggacatgaatagctcggctggtgcgattgtgtcggttgtggtgggtttgtcgccctttttggtgtctaggatttcgagccagcagggtaggggttcgggatctgtgacggatccatctttggcgagggttctatacttcttttcttctggtaggggttctcgtggaaccggcgcaacgaaaaatatgaataaagagaactatgaaatagaatgaagaattgacaggtcagtaacttgcaattggggctgcgcgtgtccggggtaccaccgcgcgatctggctggtacaagcggagtgggggaaacgtggactcaccaggacaaacagtcccagcaaactggctacggaagcaatgagtaagatctggactgggatttccaccacagtattgacgcattggcgacagacctcgccccaagctgccgccattgtggagtgacgagctgaacgtcagatgcggagacggaagacggaacagatgcggaatggggagtgagtgatgccggagggaggcaagcacttaggtccgagagagaaagggatcattcatagaggtaaggcagaatgatcctcgccatttgaacatttgaagagagagagagggcagaagagagggggaggaatgctgctagttgataatcgccagcttggccttttatcggcaacacgcaagccgatatggaaaagatccacatttgggagccacggttcgtagacactaattaaactatagttattggaacttatattggaaggtatattagaaggtatacagatatattaaaagatatcttaatctattttaatctattgttctgctctattacaattaatgtatattgtccacgggtagctcatttggaaaagacattgtcgcatacaagacctgattcttgctctatcgaatggcgcagttcctcgtaaatatgcgcactcgagatgtacctcaatggacaaagttagagtggcgcctctagcaagacatagcaaccttacagagattggcctagggagaacaggactatggtgcctgaactctctgagcatgctgcaatccataagccactaaaaaggccattgaaaagtaagtaatggatatggggttaaagaaggagaaagtctcggaagtcggggagaaggacaagggggtgtatatactatatgcgaacacttcccaaataggaaaggggactgtcactaaaagcttccatatttccaggtttcattcacatacttcccttctcttatcgtcttatttcttctctcaaacatttttcttcccctgtctcgtgtcggttattctctccacactcattcgtccaactagcaagttcaaacaacgcattgagaagccaaggcttctttgtaatagctctgaatgtgccccttctggatagaaggagcacgcaacaatccaagtccaggaagcgattgaagctggagtcttgtttcccaacaagtcagattcaatcacatttgaatgtcgtccaatatccggaaactgatcaaaaggcctgcgaaagctcccggtcattatagaactggacggacagaaacgtggcatcccgggacaggctatgttcccaatcatagtgaaaccggatggacagaagcaagagcatcccgggacaggctaagttcccataaatccatggcaatcgatgcaataatccggagactccaaacggtccagtccttggatagtggtgtccaggcagaggcatgccttccagggttggtccaagaagtaatctgatagctgatatctgtcgtgtagtcgagggcgactcatgaatttcctgtctggtaataacgaaagaaaaggatccactctctggcttcgtgtacggaaagggcccaaaagatttactcaagaaggcttgagcacttgttcgaacagaagaaaagaagcccttaggatcccaccagccccaaactgatccgccaagacgcacagcctacgccataacggaacccacagagccagcagtcacccaaccgcgttctcaaacctcctgcatctcctgatcggaggggggtgatgtctcagtgcctagtgagtaagggttgccatagagggaagcgggtgattcagccattggcgcaaattcatctgctaatcgggtgggtgtgaaccgtcgcgtctgatcgtatgtcatccagcgggtgtactagtatgagatagatggtcagttttcaatatgctaataggggcagggaaacaggacagggaaaacggacagttgcgatcctcactccaagccaaagacatcgatgccttctaggaatcactgtcgaatgttcttctatcggtggtctgtcgtcttctgtaggagcctcctcgaagaatccttctgggtaataaacccggctccacgcctgtcctctaatcaaaaagtcctccggtagctgttggatagtcgagtcgtcaagaagagggaatgtttcatcctcgatcttcgaaacggtcgtgtcgggacgaaacaaggtgtttagataacttgcaagtaacgaccacggaatcagcggttccagtcgttgtatagcagccgggttgagcgtcagacaccagacaaatgccatagcgatgtgcacactcggatacatgtttggatccccgatttggccgagcataacgatcaacgtgtgaaacgtgagagagctcgcccggaatgcgagctgggacgaaagatcgttgtatacggcgtgcataggtgtttttgttgcggctgtacttgatgcccacttcattgccgctaggcgatcctctgccgtgggattgcgcgacttcaatttgaaatctacttccaccgcccctttcctcccatattggaatatcgcacagatattgcaagagatgagttggacagcttcctgcccctgtcgccctacccggctaatttctttacggagagtagcaagaaagactctcgctcgagaaacaaattcctcaaccggagcttgcataaaaagcgcaccgtgagttgtcacgaataaagtactcaaacttccctcttgcatcttcatcagaggagcgacgagctgggtcatgctatcgaaagcatttgggaatgcgcgcacactgatcaatgctttcgtgtagtgaaaaaactgctgaagaacgtccgggcgagctaaaacagcaagatgatgctggatgcggccattttcttggtttcggtcctggctataccaatacctcgatacccctgcccagaggtcacggtccttcttgtcgaattcctccacggccatccggtaccgtgccaagtcacctaaacactcaatccaagtctccctgaaatccggcacgctttcaagtagtagtgttatcatcgagtaggagaggtagataaaatcgagcatatactccatcgagccgggcagtttctggcgcaatagctctaagaatgagtgcacgccataccgccacatacgcgccggcatagcgtacttatcggctaagtctttcagaacaggaccagctgacgggtgttgggaggcgaggaaaaagtcatggtgttcgtaaagtaatgttcggtgtagcgagacgagcgtttgccactgaggctgtgataattcggcctttgattgcgcttgttgtctgtcgatctcaatgcacttcttttccaccatgacaagtccggtataaattccgcgcacttcgttgatcagttgctcctcggtgatggtgtgggtctccggttgcctaaacatttcatgaggctttggttcctgagtgactgcctctccacccaccatcgccacatttcgatttgatatttgatcattttctgtgtgccgtgattcttgcacttgcgcttgcgtttgcatttgggtagtgtggcaagcattctgaaacccggcaccattttgactgtgcacagcagtgggtgttgactgtgatctttgcaattcgggacgtgtcgcaagggcttgaggtaggttcggttcttcttcctgcctgggagcactgatctcaatttttggatctgtggggtgtttattgatacatcgaggcacgccggacttcaagtgttgagaagccgaagccgacagccgccgaggatctctggagacccggcgacgagatttgccgacatggcctacactggtgcaagcgggacttctaatagctcgcatgccatgactactgagcgtttccatagtgcaatcgtctgctaggacgcccgtggactttggccgagcactggatatcggcgtggtgatggagcagcagccgtgggtactcattgattcagagataagttcttccgacaatagtcttttcaaagttcgcctggatgaacagtcaaaagataagtaacgacagcccggtggtcgcaacatacctaggtgacacgctacggacaattccgcctgagagttttgttttggcatccaagaggctataaaaattgcactgagtcggtcttgcctccttacggcacagtggcttgtcggccatttcaaccatctagggagaattaggttatcggttgcaccttgggagtggcgaacgcaccaaaaagagagatgttcaaatttcacatgttgtcatgaaggaacagagatatggaaaacctagttaatttataccaaatgtatgtagaagcgtagaacatcaaaatccacaattgaaggcaacctgggaactgcctgggtgtctgtctgatcccggggggatgccgatcatgcacatgtgccagtacggagtggctgggtattatattttaccatacgaactaccggttgccttcagctatttcaatgttttttttaaattatttctattgcttctccatgccccttttctccgattctcatgcaactgtgtcattggaacattcgatcctcttcttgaatggttctatggcccctggtgccaagcttcgacgcgcctgttaagagaggcagacaggtaatagccgccctgcactccccaggtccatatcttctgcctcacttttttcatatgcatgactcgccgaactatcatcaagatctgcaagaggttgaagaagtaggtcttatttgaaacagctgacccctcggttatttgacagcctcgccaaacggtcgtaggattcaagtctacctccgtcatcgccgaacagcctccagatcatcatcccaataccatttagatgtgacagtcaccgtctcatgatttggggaagccaccgggtcaaggagcgaacccggttgcccttgcagcgctagccctagggcattgtttgctccgtcaccgctatttggctcctaacgccgaattcgaccacaccggttcttttgaccaagcttcagcatgggccatggcgttttcggccaaagagcctttgttttgatgtctgttggcccgtctaggcactgggatggaccttgtgggcttagcgatttcgctctcgcattgagcattgacggcttatgtacgaagtgaagattaccgtttttcctcttcggttcaccccagaatgaggcaactcttggtcaacaggttgtctgcgctacaacatacaacatatattgtaggcacaccatcactagccgccttgttgaatcaccagtggacagggttccttgtatgtccgatgacaggcgatcattcaacagacttgcaaatgggctgatgtacagctgctaacgggttatccacccagtagtgggccacatggctttgttagattgtcaaaatgcccaggtgatgacccgacttggacgggatccgagctatggccgggtatactgctacctaatatttcctatctctatctatgcctgagtcaagatacagtaatacatagttctaaacttaggaatagctttaagactcatatccaatacaacttactatgtggtgggcctaacacgaacgtggactttgtagggtacaattggaatactcaacatcagccacctcgtacagaatctctccaagcctggactttgaatccatcaaaactaaaacaagtggcttggcacgatgacgttagtcaatccacttcctgtcagaaatcttgggcagggctgcctaagcctatcacctaagcgcccgtaataagagtgcgttttaagaggcccagtctaaaaacaacagcgtgtactccatactcctaggatgtagtcagtttcagttctgttgaatatccaattagacacatatataatccaatataacaaaacaaccacccaattaatatgtaccacctgggtcgcaatttacaaggcaacttacgcgctccacttccccccgaacaaaggggatctagcccgttaatttcgaccttcctgggaatcaacttaaaatggagctgcaagggagcgatgatgtgatattgcaagccacacgggaggaagcaggaaagatactagtgggcgcactacttatccatcacccgggtgaaggtctgtttgttccaggggagatcccctatggagtacagattatgcgacaatgaacttggattttccgatatttacttagtgtaattagtgtaataagcttgcatggaaccatgcgttgaaatctagcgtctgaagcggggaagattggctgcagatttcgcccgggtgaaatccacacgggtgaaattctacgtgacttctagagttcagggatctaggatccttctcggttgcatggcaaaagggtgtgtgctcggctaccttggaaggtatgatgcgattggtgagtctttagtgcatctgtttggggtttacttggtcttgttttaccctcatatgatcttggaggttgcttttgctttgtttcgagaatggtggatgcgacctttggagtatgaggcaaatgcatgtaaccactgacgggttttattgaaagggctctgacatctggccgctttgttttcctaaatatgagcaattcaaggtggatgccgtattaatacctggtctattttgagattgagggactagctaagaacataaatggttctataatataaccaacggatttgtggagacactagacactgttgaccgctaatgtagtacttggctgaagtcttttcccacttgcatctctttagagcccaatggagcttgggtgacatgcatgtcctctggacccgcgatatcggtgcgcatataaggatatgaatgcccacagaaaagaaacattggtatagcagatagggttaatatggctctgcaaatataatctagtcgccatcaagacacaacgtaaatctttgtgcgttatgtaggaagtctgtgagactgtcgggccccatcgacattgagatgcagctgcagctgcaatcttggggaagtttattctgatgaccaatctactgtattgaccaataaaattcttgatttgaggaatcgttctttaaaagggataaacgcttgagattaccgtggtaggaatgtcaagttcaagtgcgactcgacgagtgccagacatatagaagatgtgatatcgaaataacagcgctgaaggcatccgggtagagttgacccctgaataccaactatgcgctagtcgttgcctctaataaaaggtggaactatattgcgaatgggctcaagaaatgaatccatcacacatttgagagagtcgtttgacaatagcagacttaattacatattcaaagggagtcctacctatatttatacaatgtctatatatgtaaaatgtgtccattcaggatgtgcatgtatgaaaaggggtaccagccttcaacgacgtcatagaagcaacattgacaacaatgaatatccacacgtacgcgctgtgtccaaaacacccacaaaccaatcccatcgtaaaacatcccaagggctgaggtcttaacccgaattaatgaactccctccgccttgccgcgcgacacctaaaactaacacagcccacccccacacgcagaccaaccatcaccatcaaagccaagacaaaagccatgtcaacgttcacagtccccaactcaaacctccacgtgaatagcatcccagacctaagccaggatgatctactctcattcccagccttcaaaatctggataacaaccctccagcaatccctcgcgcgacaagaacacccctcacacgagttccacagtgatccatatgtcctgcgcaaaatcaatatccagtccgtggaccgcttcggtggcgggcgactaggcttcgtcaagttgaaagcagaggtatcgaatggccagggcgagactttgcccggtagcgtatttctacgcggtggcagtgtcggcatgttagtgagttgtccccccccaaccactaaacttgaaccatttctactcgataagaggggctctagaagaaaaatattacgccccagccccactatcgaaaacataagcctattttgttcttttctaattctatgaatagctcatcctccaaccggatgatataccctccccgaatgaaaatgacaagcgcgctatcctgaccatccagccccgtattccagcgggctcgctgtcgttcccggagatcccggctgggatgctcgatgacagcgggacgtttgccggcggtgcggcgaaagagatacaggaagagacggggctgcgggttgagcagggcgatttaattgatatgacctcgctggcgctgcaggctgcgcaggaacctggttacggtgagcgtctgcagagtgctgtttacccgtctcctggcgggagtgatgagtttattccgttgtttttgtgtcagaaggctatgcctcgcaaggagattgaggagctacaggggaagttgacggggttgcgagagtccggggagaagattacgcttaaggttgttcctttggcggatttgtggaaggaggggcttagggatgggaagactttggctgcttgggctttgtatcaggggttgaagcaggaggggttgctttgagtgggaatagtagatttgtatcaatagaggtttgtttgtctcaattattgtcctactgcaagctagtgagatatgctacaattgctagctcacaacttccatttttttgccagttcgattccctcagccagtgttccaaccctggcatcaatagcataaccgtctttttcaagcttcttcatctcgtcaaacaacgtatccaaaggaacagtaaagcattcaataaactcattatcctcaagctcaggctttaggttcttgttctcagggagggacatatcgacacggacatggaccatatgcaggttagtattgcaaagtcctgggtctgatcaagtcacatatattcgtcagctttcagcgcccgaaaaggtcaaacaacgcaggcaaaagaaaacaaagccggcagccaccgctcacataccgttatacatcactggactagtttgctccgccacaccaacataaccagtctcctccttaagttctcgaacagcacactgctcaggcgtctcacccgcatcgatgagtcccgcaggaacctcaataacaactgcatcaattggcggccggtattgcttctggagaagcagctccgagccggtatctttgttcagaatagcgacgatcccaacgccatcgagctcgagaccagcaggacgagtctggacaacgcggttagcatcaaatccgaaatgcaaatttcaaaagcataggctctgaaaggttgcttgaactggctggtaaatgggatcgaccaatgcacccaatacggattacattgcaaggcaaccaatggtcatgtgaattcggttgatgcgtcgggcaacgcccgggtttatgccacctggagcacaggttcccgaggatggggagccccactagtgctaaccacatttcctgattcagacgaggctggagcttagtctgtcacgtaggtggccctcgtggcagtcctgcgggcgtgtcattttgatacctgcaccgggtgtcatgcatatacccccggacatcgaccaacgcgcagaatacggataagcagaaaacaaagcgggataggtcttaccgtgcgctcagctgattcccatgttcgctcgacacccagggggtcagtgtatgttgtcttcaccatgcgagcccagcgggcttcgttgggatcctgtttggtaaaacttgtcagtcatggcctagcgttgtactactggtggtatcatcccaaatctattttatacatagcagactgggacttgattgctgaggggactctcggggaaattggagtaaacataccaacggtccccgggagacgagtttcgacttggcctgcgtgcgagctgacattgtaatgggttggcagtggtttagattgaaagagtgggaacaagtggcggagattcgatggcgtatgatttatccgtccaatggagtacaagactgacgctgctagatctgcgaccaatcccaaccggagtgacctcgggaggggtgatggcgggggaagcggggttagcccttatcttatcagtctgatattgatgtcttcgatgttgatgtcttcgatgtttcttgagtgtattcgatcttaggatggaaaagattgctacgtcatacgggacatgaagtaaagactcgaactgactaataaaaaggtatagttaaatggtatctcattgcgcatcaaaacctgtctatgcaaagacggaagatactgaataaaggtgcaccaggcaaagaagaatgtagcaatgactggacacagtccaatcccaaaacaagtcttgccactcttgtgtcaaagaaatctaaaagcccttgagaacggaaagcttcaagagaaaccaagagtccatgatacatagagtggcacaaaaagcagaaaataatagaagaaagagctccataacgaccatacgctcgctatcatgacatcgtggacgtgcaagcgtcaccagcgacagtgcgtttaaaggctcgactggacatcaacggagacatcattctcgatatccttcagacgatcctcaaactcagaccaatggtacatgacagtctttgcgccaaggtcagtcagggccttcgccatcgcattctgcgtgtcttcgccattgtagctgccaacgtaggcgatgacggggataccagcacgaatcgcggaaagagcgccagacttgctgtcctcgatggcaacagtctcagcagcagacttgccgacctgttcaagagcatacaggtagatagcggggtcgggcttcgaggtgggcttcggcagagagctggcagcgctgaagaccttgtcctcgtcaaagaacttgtcctgaccgacgttcttgatggaagcgagaacgcgacgcaaagcggaagaggacacgactgccagaccgtacttcttctccgcgaaaatcttctccagctcctcggtggcaccgatacagggcttagccttagcattcaacttggcgatgactttgtcctcttccttcgtgacgtattcctccagtttctctgcatcgatctcgaagtcgtacttcttctggagggagaccatcatgccacggaagttctggccaacaaagtccttgatgagctgctcgccggtgtaacggtcggggaggttattggcctccaaaatctcattggccaggtcggcacaggcctcgaaggccagctcctctgagaggaccagagtgttgtcgcaatcgaagaagatttctgtgatctgcagtaccagttagcacctgtgggtctcgtgggagataccggcaatcctcgcaccttagtcatgatgaaagtacggagagtagatccgagatgtttgtttattaagatggggaatgcgagaaaaggtggaatctgtctagtatagtctaggagagtggttggatgcaggtcaaacgaagaggagaggaatgccgttgaggaaataggcaaccggagtatttaagtcaaggcaagtgctgaccccgaaaagcaatgacgccgcgatcacaatctccaaggggaaaccgggccaaagcgggaggggcaggtcactgacgtggggccagaagtattagatacctgagattggccctattttatcgtacaaaaacaggtatctaatacctcaaacctggggagacggccagacattcagccaataaaaaagcacagacctatagtgaactagtctgtttacagactagcgtcttcttttctactccgagcaggtgcgaatggtttcacctcgcagtttctcgtagtttctcacatttcttttctctcaccgattcccttcaatgttttccgagtttgaaacttgccttgatatacaatcccgtgatttcattcttctatgagtgctctgatcaagtgacttttaatatgcaagtaaccttctcacctgatgtctagatcgtacaggattctaggttgcaaatgggccgtttcattggacatcgctccagggctggataccactatacatcagcctactaggcccaaacccatgcacggccatgctcccgtcttttcactgtcctttcactgtcctccgaggggaggcggaactccaattcggaaaaagcagccggggtacggaatgattgagaatcatacacaagtatgcaggcgcaaagctccgcccgttggtccatttttcagtctcctctcaaataactggtgcgctcagatgatatcgagcacaggggtatgcacttggacgttcagagcatgcttggcggggactttaggagagaaccccgacattaacattacctcggtagcgagtacatatagtacttttccagttccggtgagagatgagccatttgactgctttatacctcattctattattgccgtggtcaaagggttaatctatcatcatctccgtgccagggggagttgtgcccaaccttagatgtatactttttactctcctttccggagcatgacactccggaacctggcgttggcttgctagaaccttacccattattttattatttcatcccaatagagaaagatttacacaaccaggaaccatgtagcacagcgtgttgtatatgtatacatacattgcacgaacacgggtccacctcatacaaccacgatgattggccagactcaaatcccaaagataatattccacaacggccttccctcacatttgacccgaagacccaaaaaaaaacaccgcaacataacccttcatcaaatcaaaaccaatttaatcagcacggctcaacgggtctcgggccaaatcgccattttgcacagctgaacccgaaacggcccctagtacaaccccggagtacgacctgataccaatatttgaattccaaatatacttggcaacagctctagccaaagaaggcaaacatggggtcctccgatactttcccgacactagagtcccttcatttcccgtcggcgcagctgtcaatctcccagacgctttcgtctctgcgtcaatcagcgctgtccgtcgccaaccggctccagtctattgagaccgatgccgcttttgcacaggaggtcgctgaccactatggtttacctctggtagccaatgagcgctgtggtagctggtatatcccgcctacggccaaggctggcagtgcttatttcaaaagcaccgatggtcataccggtcagtgggattttagctttcgtaggctgaacttgcagctgctcccgctagctagggagcacggggggttagtataatcccccttcttactgtcttttgcttgtggagtgaaatctgtgttagggtacctttggctggccttcattgagccagataaaaccatggcaaacccatcactgcagaatccttacaagagcccataaaaggaaacgcaaaaagctgactatattttgtttgattttgcagttgtgtaattgtggactcaactcgccgaggaaaacgtatgtacccctacctgcaccatcccaattaaagcatcatccagctccccttacccaaatggtcactatgcatgtcatgaccacggctaagcctcgaactatttattaacccgcccctagtgatgcccgacgcattatcaaaaactgtcccaatctggagcgccgtcctcaacagagccctgttcccatccgcaactgcatatcacccagtccgccttccaccggattacctaggcgcatcagaagaagcgcagatcgagaaccgaatcgaaggattcgtgcattcactaaaggtacgcatgcataacacgaatgcaacttgcacaatagttgcactgcatcccccttcctcatccagacaaaaatggctgatacctgataacaactagagtctaaaactcgatcttgataatctgcgccagcaactcggcaaaccaatcgagatcgcctgggcaaacaggacatatttccacccgcaagatctgcacaagggcgaagagtacaatcttctcgtactatgctccgcttcgaggcgcgtgcatggcgccgaaatgtccgagggcggatacatccaaggcgcgggcgatgatagcgaggcatgggcgcatggcctgacgccgccagtgttctgggccaaccaggctgttttgaagagtacacctgaagatgaattgccggagcttattgcgcggctggtggctgagcataagctgctggatgtggctcaggatgcgacgctcatttctccaacgcgcaatttgtacattggctcgggatccggggttgatgttggaggtcaatatgatcttgtcattgactgcaatgcaagtcctgcggctgcagaaggcaatgcgaagcggcttaatttgggctgtgattctgggaagctgggaagccgagatctacggaaatgtctggataaggtgcgcgactttatcggcgcccgtcttccggcggattcgtcgctgtcggtgctggttacatgcgagaatgggaaggatctttcggcagggacgcttctggcgatcgtttgtctgttttataatgacgagggtatgtatgcaatggcccaggcggtctgggtgatggattcagacgctatgtgataagaggagaaaaataactaattgttttctacaggccacttcgatgcctcactgagcaagcgtgcgatcagcaagcagttcattcgacagcgtctagcctggcttgtgtcgtcgaaacatgacgtgaacccgtctcgcgccacgcttcagtctgtcaatgctttcctgatgcagccgccggattattgacctcgagcaatgtggctacgtttcatcgcttggtaggacctgattcgtgtcgaagcgccagggtcataaataacctgccccggagatcgctcattcgttgtccacggcctccacgatagcgccggcactgccctggtcgagggaatccagcacggccatatcctccgcgctgaggtcgaagttgaagacgtccgcattggacacgattcgttcggggttgtcggtcttgggcagaggcacccagcccttctgcagcgcatagcggatcaagacctgctgagtggacttgccgtatttctttgcgacttccactagtgttgggtcattggatttatagtttcgtacgatgggcgaatacgcctcgacgataatgccgttcttctggcagtattcgttgatgacgcgctgctggcaccaagggtggagctgcaaaaatagaatgtcagtgatcacgatcagaacagagatctacctatgtagatactctagagtagaaagagaagttaaacacctacctcaatttgattaacatgaggcgggaacacttgcgcatatgagcgcatctcctcaatgtgccccacaccgaagttgctaacaccgatactcttcgtcttgccttccgcgtacagcttctcaagcgcctgccacagaagcttccgcccatgagagccagagctggaagagtgaatcaagaacaagtcgacgtgtccgtcagcgccggcaatcttgtggacggaagccagcaatttatcgtacgtagcctcgaccgaggctgcggggctgaggatcttggtcgtaacgaagatctcatctcggggaacgctggtggtgcgcagtgcctcgccgacttctgcctcgttggcgtagaactgtgccgtgtcgatgtgtcggtagcctgcgtccaatgccttcagacaagactgcacgcactggttggtgggggagcggtaaacgccgaagccgaggcgcgggatgcggacactcgagttcgggagaggaaggcgatcggtaatattgaatgaggcggacatcttgaagaaacctgggggtattgtttgcgaaaggaaaagaaactgactaggaatgccgagttcagaagaataatctcctggccccgctttgcgaaaatgacctcatcctggatgactaaactcaaacacctggggccgcggctttccaaggttccgacatcacgcttcctacgatattaccaatataggcaagtcaaattgattttattctgttggactattatgatcaaggataattaatcctctgcctacttatcatcgaaagctgaccgttgtacacactggttcctgtattgtacctagtcaccagagaattgcgtgatccgtacatggtgaatcatttgaccttctgactgggcttacaattatttttataatgctattgcgccatcgaagaacatcgcccggagatatatagtgtaatctactagagtgcttttgaggaaaccagatcaagctttggtggtcacgcttttggtcagttctaggcaccaatttgaagcaattgcatacttccacttacagtttctatactactcgtgcacattaagtatctgattcatttctttcacctcagatatctctcaatttcccttaactttacttcttaggtgactatatatagtccttctcctttgctttttaatatcttcttcctcgctatcactcgcaatcctcgggcttctacgccagccctaaggcctccctctacagaaacaagggatgccctctctatacagaaataagggatgccctctctatacagaaacaagggatagtgttgacatgcatacatacgatacatgcagggtatgcgttcgtctctgtgcagagtgagcaagtcgcgttggtcattctcgaaggcttcatatacagcctcctttccatgacttcggggaggtcgtcgctccacctgataaattgcctaccgctgtcaatccgaccacgacgctgcatattgacgccgagaactatgactggagaaggcagacgggggggtgatccacgaagccaccccaaaaaaactcctaggagacccacggttattttggaggtcgccaattcggagacttacgccaagcacaattcaaggaaattccgaccatacgttgcgttaccgacagccttgtcctcacgtactaccacggcatccttaccctaacccgcccaagcaacatagttggctttcaccccggcttgggcccgacgggttccaagttagcgaagcaacaggatgccgttccctccgacgagtggaaccgtatgaaaaatgcgtcgtacagtaaagcagtcaccattgcattcgtcgacaaagccagcgtcaagagcaccaggacggtcaccgacagacatccagtggatccagaccccaaggggacaccgtccaagaagaaaagtcaacgttgcaactcgcagtgcggcgactgggtccgtcacggagatgatgttacacctgagaattagtatgccatcccacgaaaggtctggctggtgtacaagaatgaggggatgactctgaccttgacaagggtcagagtctttccctagtcattgccggtggacacctcgcaggccccacgagacagttctgtcgccgagcgtatcgagaggccactccctgagcgagcgcaggctacttcgatcttgaggaccctttggcaaacattttcgaagacctagtttgctttcttgatttgtttgcttgttgctttgtttgcctcgcctaagcgagaagagacagggtttgcatcgtttgcactagatctcggcttgattagctttctcagatcgctcgccaggtaagtctatttggtttcattccgggtcagcatcccgcagaaatcaagtgctaatgtgtatagatgtttgctgatttctcaggatggtgatgaactgtacatcaccaaggcctacgccctcgacaagtacatagctatcgtgcgggaccgagacagaaatgctatcaccaagaacgacttcttaaaaattcgacaatggggagcctggaaaattgataaacgcgaggacgtagaggatttcgctaggctagtgctggctatagccctgcagtctagcgcggagaactagcactctaccgatcaatctttttcgcccgcttctttagtcgctttcctctatgtgggatcccatcattggggattatgtagaggaggagtccatccaagcatctcatctgtttccctatatgaacggccaagatacgatggatgcgatattcgggaaaaagaggtcagaagaacttttctccccccggaacgggctccttctgcatacaaggctggagcgctattgggatgctgggaagttcgtaatcgtccctgatattccgagttttcagggcaacgccctggtatccgcggtcaagtactggctcgagtgtgagccccgggagtaccgtgttaggctgatcgacccggattgggagaaacttgacgagtccgtctctagacagacgagtctgacattcagacagctagaaggccgtccactgaagttccgttcaggcttccgaccagccgctagatatctgtacttccattactgtgtgcaggtactacggatgtgctggcaacatagcaaccgcggcaagtcaagccaagccgctgcacttctacaagcagaaaagggcaggccattctgggggactgcgggaagatatctcccacacaatatgctcttggccctcgtagaggagatgggccatgaatattcattcgtcatgaacggggctgctggaagtcgggccaatgacgataaacttctactagccttactttcgaaaaacgtcaaggcccggccatctattttggccccggggattttcgataatgcttgttcttcggaggaagacgtgtctggggttgatgacgatgacgacgatgacaacgaggatgagttgggtgagtagggtcgcttcattcaagaatagccggggatacatgtatgtattattaccacccgtaccagaattgattgggaattaccatgttgcatgtacgttgtatattctttccgggttggtagtcactagtaacctgatttaaatcgatataatcgacaatccatcatcgacaacgaccaggaagccacccgaagccttggatccaaccaccagcagtcctgatctcgaactagctcggtgtcgagctcgtatgctctcgagcactacgacgaccaaacggaaagggaaagccggctagcccggcctaaatcccagtgtatatgcagtagtatgtaccggattttaggccatcacgattttcccgatcggggtgcctttataaggcttaattgagtattttatagtatagcggtcctacgctacactgcccccatacctttctaaggggcaaagtgaaagaattcgtctttgacgtgcctctgccctgcacgaagccatccgctttctcttcggccgactgtctgctgctctatctaccttaactgttcttgttctttactgcatacttcataccatttgctgatgagaactgtgcattattggggcattctgagagcagaatgtagaaatccagatgcattagatatatcatttagtacaaaacatatgatcaatgagaacaaggtccaggtatgccaacatacaaccccaaagcatctttacaatgtcatctagaacagaactttgcgagaagcattgataccactcaaattccatctttctggggcagtccgctccatccatatcgaccaatctccccagaacgcgggcctcatgatctgcgcatactcccaataatccggataccagcctgcatactcccagtcgataagccctgtgatgttaccattctcatcaatcatgacgtttcgaggtgcgatatccccatgcgcgaacacagcatggtcagatttgggcagcatgttgggtaattcgtgttcgtaccgactacccccgcaatggagataacgctcatagatgcgagcccgtaggtccgaatcgctggttaggggtcggagtggtgattgtagatcctctagtaagggatcttttgatggggagccgtctgccgcgcattgaaatataccctcgtattgagatgggacggaccggatttcggagatgagatcccaggtctgacgacaaatagattctttgttttttccgtccatcgtatcccatgtcccttctaatggagatccctggacaagggacatctcaataaacccattgtactcggagctgaaattcgtatggtacacttttggtacaggcacggtggtatatctagagataagtctcatagcttcagcctcagcgggccgtaccccatgcccggatttagtcacaagcgaaaaatcatattcaagtataatcctgcccattggtttgccgagcacagtaacgacctcttcgtcaggggccaggtcgaagaaattgaaggcgttcacggaggatggacatgggaataatgtttggcctcttttgatatatcggtttccttcttgaagattttgtgtccgaaaagggcgccttcggagatgtcaatcatcttggcggcagatgcgtagttctcatggtgctatcgatgtcaattggtgatgtgacctgtgttcacattggtgggcacccagctgaggggtctagaaaaaagttgtcggggacaggtagaaaaaaagcttactaattcctagccctgacatacgggctgcttatttctatctttaaatcctcttggttagttattaaatgtaaaaggaaacacagatgtgaatgcaagcgacgagattcgggcacacttgctttgtaatagttattatacccgtggacctacgtaaaatcactatctagctataaggtagttaggactgcgttacactcaagcggatgtcatgtagatgcctgaatatcctcgcgactttgtcgggttgcgagagatcaactagagaccactttgcgcctcgcataatcttcaacaatacccatagacccacgaagacaataatctggttcaacagatcttagttagccaatgcaaactagactcatcacaatattgcccttaccgtcaggtacgatgctaggaatggtaaaagatggaacccattccacaatgcagcaccgtttgcgaccaatgagacaaaaacacagcctaaaaaggctagatatgccgtcaatggctgcctgtggctgcggtacggatagtcatcatggccatcgctccagcgctgaacgtgggcgacatgttcgcgtcggagataatcgcgatgccgagaaatactaggaggaagagttctagttaatattcggaagatccagcatctgaatgactagacacaccaatggtagaaccgaatgaatgccagacactcacacgcccagacgattaaaaccgcagagtatgccatttggctcaatacctccacgaactattcacgtttattagctctgaactcgaaattagagggaaaatccacgtcacatccttaccatatccacggacgctcgagttcccttcaaggaggagtcagtggtagcagaggattgagtactcccgcggatcagctgcaggaatggcacccaccagaacgccaccgcggagaatatcatagctcgcaggggaacctttcgtctatctgttttgccaaaccatgcgaatacacgcagataccacctctggccttcgcctccatccaaacgacttgttaagccaaacaaagcccgagaggcgacgtacagattggtaccagcacaagagaggcacgtgaacaccaggaaagcattgaacacgtctgccaagtgcggaatattggacattgtggctattgcgacgaatgcagcactatttgaaggctttgtgcacccggcttccacatccactgaaagccaactgagccgagggagagcgcaactcttccgctctatatccaatgtcgcgagcagcccgctgatggtataggcaaccattgcaagtacagggataaatatagcggaaaacttgaatgatcttctgacctggacgtcattagaccgtgaaagtttgtctgagattggcgacatttcgtctgcgcgatgtagccaccgtgcctctagggcagaggcagcaacaacttccactccggtgtatgcaaaagttgctattgaaatgctcatccttgtatattaattagcaatttgagcacagataaagacgcatgctgcgactcacagtaaagcggtgccccagttattggccgcccgtgtatcaaatgcggtaggcgaagtccagtctgatgatatcagtattccaatctggcgaaaaatgtatgagacggtagcaattgctcacacttggcaccgatggggagagtattgtttgggccagctgctcatcgtcagcacatattccccgaagaacagacacacacagtccaaaccatccgttagccactttactaacctccaagattgattgcaatcagcgtcactatgattataacaagaaatattattttcagctggcggcttcctagtcccgaagtcgcgagtattcgcattgatcagcaatgacggatgaagcatacctcgattcttatggcattgatacagacgagtatcagtgggatcagtaggtatataatcaagccctgtatagccggtctttcgtggatgtaatcccaaaaattgaactctgcagcggaggttgccaccagtgtggaaaatgacatcgagtaaacaaaccttttatagttgtcagcagctcttccctagtcctggagtctaccaaccctttccatgaaatttgctgagaatgcaacttaccagtacgtcactccgaccgcaatccccagttcttcgtcgacgaactggctaacatatactgacaatgcaccgggtattggccaaatgcacagcatttcagtgatacattgcatgacaccccatgttaggattccgatgaagaggaaagatagaaccacagccaacggtccaccgagttcaagaatctgaccaccacgccagtagaggcctgtaccgagagttgcattgactgtgatcatctattcctgttagcttttcttatttccaagtacaacagattggccaatgttgtctattgaaggctacaatgcagaaaggccccctctcaagttcggaatttcggaaaatctgcacatacaaatatgtggacacctttcaacgctctgctgacagtccgttcccggctaagtccgacaacaagccgttcctctgggcatttggtgagaatgccagtgtcttctgagtcagttgaaacagatgacggtgcgcttatcaggctcggagagtgatttggcggacggagaaaagaattctgggatcgcggatgtggacttccacttgggatttgttccatccttgtgggcaaaacaccagagagccagggtcgtgcccatgctggtagctctaccaactgtgcctctgccggttgcgacatgatgcaacaaagcgtataggtctcctatcaatattgcaggattaccacacgatgcatgttcaaaaggtaggggtaatttctccaataaaggtataacactaagccgcattttgagcataatgcaattagccctcctggccgaactacagatattgaaagcttcgccccctttggttgcctccaagccctagaattacatccaagcagtatgcacccgggtgaccaaaacaaagcggaagcgatatcctcatgtggtatagtcgcgcataatctcaagaaaactatcgaatcagcgatacctgatagaccgcgcaaaattgcaaaggataagcaaggcaaagatcggctttgtgacgtgtcagtgaaatttgcccgggtttcagccgcagcttggggtttatcatgcccccgtgtttgggaggaactgtaattcgtaaaagcaaagtcgcgattattttgaaataaccatgcctgggaatacagaagaacaacaggctcctatgcaaaccacgagtagccgctacttgcggagagacagtcttcaggatctgcttgaacgactgttccctggacaaacagacttcggtattcaggtaaattgcctgaaactcgcgcatcgggcgcaaggctgactctaagattctagcttctagaagaccagtggatcttcactgcccctaagatagtggagactgtaagttacgatatcttgcctctcccgaaatgaagtccgatgctgacacctcttcacaaggctgatctcgagtaagagttcttcagtttttgttccgaataagtaaactgacatggaattagttcggcgcaggatgtttagcctaaggctggtgtgataggaacacgagacacctcgagtagaggcgaagcacatgaggcatatcaggggcatcgggaatagggtgtgtggcggagttcgctcaatggacatgcctaggtaccccgggctcgtagatctgatataataattcagatcctaaattcaatgaatctaatctcatcattctctctaaaaactgcacataatgacttcctttgatcattactgcctagaccacctggttgaacctgtacaagtctttgagatcggagaggatgcgacatcgttcctcccaagaggctcataccaacgatcggaccttctcacggtagatgatacggtatcctttctgaaaaacaatcagaagccttacaaatgtcgagtagtgtatgtttaaatcggacatcactctttcttctgctaataattggtaggtcaatatgtcaacgtacctcccggcaaccactgcaaatcactaaacccatgcttgacctcctcgtcgctggacacgagataggtccatcattttgggcggtgccatcatgtttttatcggcgcagtgatgacctcgaaggggtgttttgccttccatttacagagtcctgctctggctccataaatggtactttcaacccggtggatattgacactgttgctaaatttaagaaacagaaatatcttacaccgtgagataccccgagtacaagccacaggaggacaaatgggtcattcgccagacaggaatttaccaccgatacgacaaaacttcatcccaaagtcttttcgtattgttcaaacctacgccacaatcgaaagcgcattcgcaggctgagagtttactacgcaatctctgccctgaggtggagtccgatctcttttggctacaccgggtcttgttcgcaacatatttcccgacatggaggaaatacatcgccgtacaagaacaacgatttctgcctctgggacggagtgcaatcgccacttttattagtggacctttaggtctaggccacgatagccttataacattgacagccttgcagactcgatttctcgaagtcccggccatcttggcatcagcgacaggcattctcgacgagctgtgtaccgttattagctcccagtcagtgatctcgaaaaattacggaattcactcgtttcaaaatcatcgtggagagtgcattgcaaattcccacaatgcttcacatttacagcagcgggcacaggttatttcaaagctactagccgacactttattgtttcgggatcaggtcatggcaaaggaacaaaatacgaacatgctacagctgaacaagtcggcagtgtttataacccttttgacgttgttatatcttccttcatcattcgtgggcgttagtacccctctgatttccaatacacctttgtcaggccgcgactgacattctcacgacagactatattcggtatgaatttcttcgacctggatcaagccaacaatcgtatcgtcggtacacctatgatatggatattctttgcctcgtccattgccctgacagcaggcacgttccttctatactactggttattgcgccgcgacggtgaaacccttcgcggcattgctccgagtagtcaaacctggagtatcggagggttaaggaggcggttcacagctggctccaatgccagtattgagctgcagtcttgtccagcctgagaaccaagcttcgataagaaaaatactgtcagttatgtcaaagttctatgggttttgggtagtaaaaccgcagctagacatgagctcgagataataggcaaaaacggagaaaataacattatgttatgggaacagtattgtaataccaaaacaagatataaatgattatcaacaatagcaacctatgctgcagctgaggtacccgatctggaactaggcacagtgattttgtatattccacattgattcgcacccatcaaagcagcaagaataacgacactctcgctttcaccatggacgactctctctgcaaaatcatcgctgtatgccagacccggaatttcagcaagctctgtcacagaaatctttgtttcctgaggcagtggcatgtcaacctctaataaaagcatcttatgatgggccgcgcgccttcccacggcgaatattttctcatcatctttgcccatcattagcttcagcactcggtagttcttgatatcggcctgtatagcagctgtcttatccagttgtgcaaggctttggatgtgcaactgtttttctcgggtgacaagtacacaaacatggggcttttgggaaagtggagcgaaagtggtaaaaagaccaacagtgctactactctcaaagccctgcataggagagattagacggacaattgacgttgaacatagcggaagactcacttgtggttcgataatgagcggacatagctggttagttcgaagggacacatgaatgacgggaatttcgtgcttgcgatttggaccacttcgctgtggtcggaaaaccatgtggaggtcttcgtctgttgagaatgataactgaaccacgtctgctgccggccagtccagtttatttccaagctgccagtcgtatggagaatggatggaaccaatgtataaggagccgggattttggtcctcgtctttgtcgctgacaacacatgccagtctctgacctccaggcgcgagagcaacttttttaatctccggcagtgttggtagggagattcgatccccatgtctaagattgacgtccatacctactaacccccttcgtagtttgaagatataacacttccaaatctcattagatgggaatgggaaaaataaaagtggtaaaagagaacgaaaaacttacttggaaagttcctccggaggtagaagctatgagatgttttctggtcagactgatactcttccagcgacattctcgtatggggatcggatattctgcagccgggcgtacgatatcaacctcctcttgctccagagattgggaagtgtaaagcgaaattttggtgtccgtccaaaaggcgataacagtcccgtctggagagatctcgcagcctttgaatggctctggttcacgtagataccaacgctcgacgcttctgtctgtcgcgggctttttacctatgagcacatcgatgcgcttcctccggagcctgctgcctagaccagactcttcctctggcaaagataggcccccttcattttccagctccttgtactttcgatgtgtgtcgagcaacttttcctccaattggtcggctttgcatctcttcaattgatcaggctgaagaacctcgcgctctagataatccagcatcgatctcaaagcttctccttctttggaactcctctttctagctttctttatcagtttttcatgccattctgtgacctctgggtggatccttggtcgactaaatagcgagtttgtgacaaagaagcgatcaccatctgaggcgcgatgctttcttctcctttcccgatacctttccacgccagagctgccctcctccaaatacgcaaaaacaatactgaggacacatcccaaagaccagatatcgttcgctgttctcatagctcgatgtggtgaaagggactcgggcccaagataagtgccaccatctccgcgtctgttgtaggttgccgaggccgagacatccctaggctgttggaagcggacaaaccagctgtcgaagtctgtttcctcccggcgagatttcaatttgaggcgagacatgccgaagtcactgattttccagacgaatccctgcttgtctcccacgttttcgaggaagaccaaaatgttgctcggcttcaggtccatatggtaacagactatccggtccccttcggcagtcctcatgccattatgaaggaactccagcccacgcgcgagacctcgagcgcaatggattatgtccgccttctccgccgtcgtatacggtctggttcggttgtcctccttcatatgcgcgctcagatcgcatatggcgagaggcatgaagatgctgtaattcgtgccgatggaaaggctgccgtaaatatccacgatattcggacacgtccgatcgcaggcaaggattttcttcaagatgccttgttccatatcctcggtggattggtaatctttgcgtgccatttccttcggctgctgatttgttcctctgatgtctgagtcgtaaaagtggcccttggcaatcttcacttggtatacagtgccgtacgctcctttcccacgaactttctgctccaggtagggtagacattgccggtccaggctgggaattcggacttcctttttgttgcagatcacaataggacaaaaacatgcttgttgggtcataaatttatccggcgtgacctgttccccgaaaatctccgtgagcgtcttacgctctgctggtagagcgtaaagatctggcgaagtcgtctgagccaatagtttgatggtgaatgtccgagcagcctcgatagtgcaggatgtgaaaatgagaatcgctagaaagtcataaagcttccgttgtcgcattttgagcaaactgtcttcaaggtcaaaattggatatgtccaactgaagactgcgaaaaaatcgtcgcaaaacttctggctgaagtactttcctcgcggtgccgtgaggagcaaatcggcccccctcttcatggcccctttccatcctttccatgatttgcacatagatctcctcacatagctcattgtattgagtggatgccatggagtttgctctttagtcttcggcacgtcacacaaattgtaggaagcatttacaagtaggcagaggtgacaatctctgatctcctgaccttttgcccgggcgttcagaaagataaggcaaaaaagcaaaaataggcaaaataggcccatttaatctggaataatacacagtttattcatttatacataccaagaaaggggctataatgaagtacaggatattaagacacaggtcggaactcaggactcttttgctcgcagtttgggcgaagatctgtggaactggctctttttcctctgcccatttcaacccggacatcatctggtaggtctttcgtttgatgaggcactaatctggtcctctacaagttcatcctccaaaaacgcaaaccgagaaaatgtgttgttttgtgtgcttagcgactgcttctgcttctaatgtgattcagtgaatagctgtaatatccagtcttcattcattttcatcatgtcaaacttctatagtgcgttttgaaggcaaaataaatggatgttgactgataaattgaataaacacggccaccaaagggtcgcgggcgtactggtctcacggtccgtcatggctagatcggattaatacagacaactttgaattgggggggcggtggtggggagggatctgactatgaagcgttctcaaatgcgacctttcggccctttgaggagaggggcaattcccctcagatgtaataatttgcctcatcgctcttcgggttaaagaacatagaaacgtcatagggaaatacaggaggaattgcaaagaatccatccatagtattcgtagaactaaacccttccagcccaaactcattaaacatatcccacgaggtaggagtgacgtctgtatcgataggcaacgatgagacctgtggatccaatgccgtgttattgggagcgcaagtctcgacagtcggagtatcagggcgctgaaaccatagcttgtgaagaagccttgcatagcgggaggctatgtggttttggtcatcggaaatggctgtgagaagcgaaatgaagcgcttcattagggcttttgtttcggagtacctgtttggggagatggctcctgatgcatgggctttgaataggaataccgaggagtgaatttcgtatctatttggattagtttcattcgtcgagtcaagtatggtttaatcaggttagaacttgcaggtagaagcgagttggcatgtagcgtaaatgcttctcgggatcgaagtcttcggcaaatgttttcaacagcgattctgcggcattaagtgcttcgtggatatgtcgcgcatcagcactagccattgtcgagttgggaaagtccagacttggtccaccgacatcacttttctctggggaggcgcgggaagcacgataaataacggcttggaatgcaaaggcgttgacatagagtctaagataatccttcatcaatgtcaaaaagcttttcaaatgcttggataccgcaagtgattgccatgcatgctcccacgcagtcattgctcgaccagtatcgtcgatatacttgacatagtctccacgggtgatgagcttcaccgtatgcgatttcgatgcaaaaagaatatcgtgcgcgtttccgaatagtgtcgttagctcaacttgtgcttggatccacgatgcaagatcttcatcgttggcatgattcggttggagagagggaaagtcttgtgctgtgaatcttctcgagagaccggggccacggcaccagaaagcttgacccattcgaatcgatatctggcgatctgagaggtaggtgactaccaatgtcaatacttctgtcttcttattccaatgaaacacttacaggtccacgctagacgcttccgctgcgacgcagggtcgagctcttggttcttttcttcgaacccgctatcttctaatcgtagccgatatgccagtctcacagccacgcctaggattgaccatgcagcctcaccaccatcgtcggtctgtgtctggccatagttgatcagattccattctccaagaagtaaaagcccttcgacacagccaatatggcggctggtagctaccccgagaacaatgtctaaaatctgtcggcggagataatcccaggtggctttgtagagatctgtgagatcagagcagtcctggagcgcaatgaccaagattgcagtgatcaggaaagactcttttgttgcaatctgttcaaggcgggctgggtcaagcacttctgggggtactattgggaagaatggatggtagtttctcctgaatctaaccgagatgagttattgtttcaagtgccctcggattacccgatgcgttgacttacagacgtagaaggtccagcaacagcggcaaagtaattatcttattccgcagtagatagtatgagcccttttcatggtccgccagataagtggtcgtaatagatgaggtgttacgacaactgccaatattatcatgttgcacttgtccgcccgttccccctggggcagcaccactagcatggctatatcgagacactcgagcgtcatcgtcgataatacgttcttcttgtatatccggctggccagctgagtgagccagaatcagtaaggcatccgatgggttctgtagattgtcgtgtgttggcgtctctgcatttgtgggttgcaaggcctcattatccgaaggcgaagccgataggcctgttagggaagaatggacgttctccgaacattgctgactcggtccttcgtttgctttctgcgaagctgattccttccgtgaccggcggtatcgagagaagtcaccaccacggcgagaacccgccaggacacatacggcgccctcacgggagcatttgacgcacggaggtatccccggttctccagtgctttgcctatagggaccagactgttaatccgcaattttgactggctagccggttgaaggggaaattcttttcttcatggggctaaggatacgtacagatcacatcgcgtttttcgggagcgacacctcacacaggcccgatattgtcgaaggttctggcccttggtcatttctcatcatcttaccccggtccgtgtcaactgtgcaggccaacttcctttcgtgcaacctaattgatgcgaaattcgtttgagaagttgggggtgcccaaggctttagacggctacagatatactcttccccgcattcgggatgtatgccaatgcggggccgggtctagacggttatagatggctacagatagggccatttcgaatcttagatgtctatagcttgggttacggcatcaatggtgacgctcattggtatcctgaaggctcaagtgtcgcattggtgtctccagagcccggccttcctccggcgtaagctgtggggtggcttcatgagccagatatatagccttgtttatatcatcataccatagcgctccgctttccatctcttggaaagcatattatttctaggatttcggattgcctgagctcaggcttttgttagaaacctcatttccacggccattaccatggctcccagtcgtgttgaaccaccccagcatgccccaacagtccggacggcagaaagcccacggtctaccagtaccttgaaacctgcagtcaatgaccagtatggggcatactatccagccgacccggaaacactcaaccttgagtccaatttcggacccatggaccctggcagtgtcggataccttcagccgacttcagtcgatacaccactagaaattatgcatgaacgatttgagcgggatggatatctctttgtatgtcaattatctcacgctacctgggtatcagtataatatgagctaatccagtttggtaactaggtaaagggatgtatacccagagaagcctccctgaaatgccgtgaagcgtacttcgaatatatggcaaaaagtggtctgctgaagaaaggaactttgcctgttgacggtatcttttccgaaaaagacagccgaaagtatctgccgccagggaatctccgccgtcttttcggactgaaagacgacgcagagagcgagaagtatctcgaactcatgatctcggcccattcagcacctttctacctggacttttgcgcgaacgaagaacttaaaaagttcatcagcaggttcaacggctggaagaatccacaaatgcttcaacgaaccatgctccgtgctttcgttcccaatagcgagttgacccctgttcacttcgaccagatgtatctacgtgctggtcctcctacaagtatcactgcgtgggtacccatcggggatgtgtctctcgagggtggtggcctgatgtaccttgagggatccactgatatcggtcagaagtgtgaagcagagttttcgagaaacgcacacaatctgtcagatgaggagcgcgttagtgcttttaacaagaacatgagtgatggtggcttcttgagccgctatacagtggcgtatggaaaggaagtgcgtcgaaaatggctcattgctgagtacgaggctggagacgttatcttccataatccgtggatggtgcatgctagttgcaagaataaggatcctaatggtaagattcggctggcaaccgatttacgatttgttgatcctgagaaaccttatgatcacgtatgttgcccttccctgattgagtattatctgactgtacgctggctaatttctacaagcgatggatgaaggtgtggcggcctctcgacggcctttaatggtcgcattacacaccaaatggttaaacgtcactgttgagcatgttttacagatcatatccatctgcccaaacccatattggaccagaacttttgacctccagacacctatcatgttccagtattagtttatcgaagaactcgaatacagattgtgttctgttgttttcatatctaccctcccatgactatgcatatatctctagaacttccgtaaaaccgtaacgataacgatcggataactacgttcgtatttaggtagataataggatatcgttatagtttaggagtgtcttagacgtatctccgccctttaaatcgagctagtagagatattactattataaggagtagtgagctagggcgggttataacttataactagaaaaggaaactactaagatctagggtaggttaactatacgcctatatagggagataatagaggttattagataagattaaggatctatatcgatctatagtagcttagatatataagcctctaatatttaagtaacggcgtaactataagccttagcgcgctaagggctaagataataataaaataatactttatagtatatattatataagcgattcgatatttaagtatataggagataagccttagttcctaggttacttactaacttatatctaactagaaactaattatagacgataattaccctctctcttatagtctaactcctttctttcgtaatattctatttagattctaagtttcgcttatataacttagaaagcgcccggctaaattataggggtcgggctaagccgcgtaaggggtagagatagaggctctttctacctagagatattactactaatatataagttagcttaaaaagcgcttaagctattctagttatattcttaatattcgaattttttctatttttatatttcttatagaatgattaacgttagcttttatcgaatatagtttattatagaagctaaataacgtaagggctaggaatataggatataaggataagtaccttagagttagcgatattatctttaatacgagaagggtctataatcacctaagcggaattgacttttatagaagagaatggtcgatcaggcttctagcggatatgactcgagacttaataggggaagagagagaatcctttataaaaagcataggaaatgtatactataaagaaggataatataaaatccctatacggagtatatagttatatgcttcttcttcgtatcctcttaatatagtaggatagaaaggaactagtaggaatcaataataaggagcaaaaaccaactaagtatagtctggattgaaacgtcgagatgccgatatagtgtagtccatttatatactaaagatagtacggagtaagtattatcaaactgcattcagctgaggacactagccttcctttagcagtaggagccaaaatgtcaggttctgcatactatagatctgcatctgggccctttaattagggttagcgtcaatgagaatcaaattgggatttccgacagaaaagagttgatggctatatagagcggacacgtagtgcatcatccaggcgtaactaacaaaacatgcaggatatatccggacaaggtcttagagctattacaatatacgcgaactatttttactgggtttgaaggcaaactaaagaacgcattccctcatgaattccgcatccagattcctatatcgagcagatggtagataaatccccctcgcaagtgcttttgcatgatatatccaaccgccccttcttcatcaagtctggccttccattgatcccagtctgcttcatcatcatagtattcgcgaaaaatgcacaacgcaaaaatgaaaaccttgaaatcattctccgtattcctcataataaaattcctcgatcacaaatgagattgataattcgaatggtgtcttcacagatactctgccaggattctcttagggcgtgtatagcaacctcggtcaagggaaaccttctaacgtactataaaatggtactagggatgtcgacatattcttcactaaccgacgttgtctgcgaggtagaattgggcattgtaaggcatgcgaacagttggggtgtgtgatccccttatatatgtatgtatcctctagggtgtcgtacacttcaacttcggtcccgtagagatctgagatgtaatcatgaaaatacgcttcattttgggaatcgttccatgtgtccgatatccttaacatgctttttcgttgtcgtcggtctcggcgattaactttgacgcaccaccatcgagaacgaactgatgatattccttgtcgatatctggtgtctagggatataattttttggtcttttctgagttctgttgcgaaacatccgtatcaccctccgccgaagaagggcatgctagtcgaacaaccattacagacgaaagggtgaatggtccaaagacatgcatgattttggcggtccgttgtttgtttatatggtgtctccagctgcaatttcattgtattccctgaccgatctatataatcagtccgtctctacctatgtgcataggtaaaaaggtgggggtactcccttaatcccttgctccatcgtgattaggagtatctggacttgagctcataaaaatattgaatatagaaccctggaatatgagatagaagatagacacgatatattgagtacatattaatgcccaacggcgccagaatgcgaatttgaaactcggcgcaaagagaagaccaatgtatttgcacagggaagattgaaggagtcctagtcgtatcaatataaaagaaactccctaaaagacaaagggaaagggggtttgtaaacaatggctatacttagaagtgggtccacaagggatgcatctgcagtaattttcctaaactgccagtcttaaaaagtcttaactatccttttttcgtctttcattttgattcaagtgctgattctcttcgtttctcttcgagttcgaacaagaaacaccggttgctcgggtgatcttcagctccgacttgcgggacaaacatacccccactcgacattatttcccctccccctcccctttgtgctccattgtctgatctccagtccgaatcggaaagtctttaagcttctccgatcatcctagcccttttctttttcaaaccccatcccctgttcgctgtcatcccccgacattgccaatcggccctgaatgtctccgccgtgatcgaagatgttgacggttgagaagcagtggattaatgtgcagcaaaagaccttcaccaaatggtatattccctgtcaacttctctcttcgtggacctcatgaacctcagctgacgagtaacgttaggctgaatgacaagctgaaggcacggagcctgtccatcgacgacttggtcactgacctctccgacggcgtatgtcccaccttatgccccgctcaataacttcaagttgctgatcgcatattaggtcattctcattcacctccttgaaatccttggaggagagtccctcggtcgatatgcctcgaaacccaaattgcgcgtacaacgcttcgaaaatgtgaacaaaagtcttgactttatcaaggggagaaggatccagatgacgaatattggagcagaggatatcgttgatggtaatcaaaagatcatcctaggtttgatctggaccctgattttgcgatttaccatcagtgacatcaacgaggagggcatgactgcaaaggaaggattgctactctggtgtcaacgaaagacggcatgctacgatgatgtagaggtccgagacttctcctctagctggaacaacggcttggccttctgtgccctcctcgacatccatcgaccggacctgatcgactacgactcgttagataagagtgatcatcgtggaaatatgaagctggccttcgagatcgcgtccaacgaaatcggtatcccggacctgcttgacgtggacgatgtatgcgatgtacctagacccgacgaacgctccctcatgacctacatcgcctactggttccacgctttctcgcaattggagagggtcgagaatgccgggcgacgagtggagaaatttgtcaacaacatgcacggcgcatgggatatgcagaactcatatgagcgccgagtaaaggaactgttgcgactgattcgcggccagcgcgagcactggaagaactcctcattcgagggaacatacaaagacgccaaagaacaattgtaccagttctcgctttacaagcggaacgagaaacgtcagtgggtggccgagaaatctgatctagctgctttgctaggcaatatcaaaaccaagttaggtacatatcgactgcgtccttacgacccaccgcaggaactgagtcccgagaactgcgacaaagagtgggagatccttacccgggaggagcatgaacgcagtcaactcataaacgaaacaatccgcgacatcaagaacaaactgcggcgctcctttgctgacaaggcaaatgactttgcactgaccctgaagaccctgtcattggcgatctccggactggatggcgatgttgaggaccagcttgatcatgttcaaaagttaaatggcaacttgccgccacttgacgcctttctcgacactatcgcagaattggaccaacagtgtgcggaggccaatattgaagaaaacgacttcaccacatacaccttggacgagcttgcgtatgagctgagtctcgtcaaatccagcatttcaaagaagctggctttccttgacaaccaaatggttgctcgcaacatgaccaatctgacccctatccaattggaagagtttgaatcggtattccgtcatttcgatcgcgactcttctaacacgctccaggagctcgagttttccgcagcgctggccagtctgggactggtctacgacgaggacgagatgcaccaggtctacgtggaggtttgcggggtgaaccgactgtcacagaatgctggagttagcttcgaacagtttattcgctttatggtcagcgtgacagaggatcaaaatactgccgaacaggtcttccaaagtttcaaggaagttgccgatggcaaggtatgtgaagcgtttctttaacctctcaggaatttaccgggctacagccactgacttttccctgcagccctatgttacagaactggacctccgacactcgctcattccagacgatgtcattgagcatttagttaagacgatgcccacacacgacggtcccgatttactcgaggatcgggacttggccaagtacgactacattagtttcatggagaagatgcgagaagtaaacaaaaataatgggagtgagcaataaaaggtaccattgaggttgatatccgcagcattactggtggttatgggggatttgcactgacttggtgttgctgtgtttctggtgttttcagggagaatcctcatgaccttttttttcttttcgaaacccggattctcccttttctttttctttttctggtccatcttgcatcctggggttcggtggttgtctctcttaccacatgtatttattgtgttggtgtatgcttctctgtttgtaatgatcaggataccatgtgaacattttcaactatcgagactatcgacagacgtggagttggacttgggcaagcgaggatagccacggcatatgaatatgcataaaataacaatttccttgttactacaacggaatcctttgaagctattttgggcctggtcggatagatgtggatactgccgatcactaccgcattcatactgtgtcatgtgacaggcggtccccagatccatcggagctgatgaggatgatcctgcgattcattgtattccttgacacatcacacttatttcgatctttttcatttaaacactggtcataatcggatttgttgaccgcactctctctttcacatatattacttcttccctcaatcccatcccccaaccatacactccaagatggaccgcagcttggacgagatcatcgccgaagacacggtaaggctccagcaagcaagaaaaccactagagcgcacaattaactcagtcaattgcagcggaaccctagtcgcccctcaggcggtgatggtcctcgtcgtcacaacaaccccggccgtcgccacgagcgcgatggcgtcagaaaggtacaacttgacttgaaatcgaggctttgttctggagttatatttgtatggcagtgaaactaatatcttactcactatttaggtccgccctccttttcctctgcgaattctcttcttgctccgtgacaatcgtagccagtcctctggatcgttggactcgtcaacgaacacgccacggcaaagacagggaacagaactttgcacgatatcccatctgacttggagctaacgctaagtcttttcgataacaacagccatacacttcagaccgtgtcgatctcaacctgtgattacacctccctagctactgcgatgtggatgatactgaccggtctctcgttctagtgactgggtgcacgacaaatttgacgacgaccgatgtatgtggattacccgtactttgtccacatctctctaacaccattgctcttcagcccgcccatcccgtggaggccgcagaggccgcggcggatatgattccgaacggtatggatcctcccattaaaccagccttggcttgatagcttgtctggtcaaagcgctaattgaatgattagctctagcacactgaccaaggttcgcgtcgataatcttcactacgacatcaccgaaaccgatctcgaggtacgttttcaatcaccccatcaacccccatacaaaaacacccctaacaagctgcttcgctgaacaggatctcttcggccgaattggacctgtttctgagcttactgtctcttacgaccgcgctggacgctctgagggagttgcttttgttacatacgcccgcctgaaggatgcacacacctccattcaggagtatgacggagccaacgccaagggccagcctatccggctttctctcgtcgggggccgccgtgaccgtaaccccctagactctgcacagcgccctaggtccagcctcttggaccgcattcagcgcccccgtgacgaccgcagcatgagccccgaggacaacgcagatggccgacgccgtcgtggcggtggccgtcctcatcgcagcgacgtcaccaagcccgccccagacaacatcgaccgttatgtgcccggacaacgctcccaccagcgctcccctaaccgccgcggcggtggcaggcgtggacgcgacaaccgctcgcaacaaactgatggatccaaccgccgatccaatgcccgtccgcgcaagacccaagaggagttggaccaggagatggaagattactggggtggtgcgaacaacggtggtgaagcgactgcgcccgctcaggatgtcccccagcagactgctccggcccccagcgcacccgctgccgatgatgatatcgatatgattgagtaaatacttttcggccactcgaactacgggaaaatcgcttgtcttgagcatttcagatctttcgggcttcgatcgcattacttcttgggattttctatgaattaagacgacctcggcctttttccactttctcttcttttccatcgctgagcctttcggcacgagagctgaaactctgtactttacctcaacaaccaaattgtaactcggtctatatcacacattcggattttttctgcttcgattcttctttacccttgatggactcttatccttgcaagtccttccatgtccacaccggcgaactgggagcccatgagaaagggttttttttttattgcattgttcggtgtcttccttcatgtctttctatcgtctaatcgggggtaaaagcctatgcgcatatgccataaagcctgtatacagagaagaagaggctgcttgcaaccattaaatgagggcaaatacaagttgatagagcataaacccaatcaaagccgccgccaattataaatagaacaaggatcgcaatgatggaagaagatatgatatctttcgtgatttattctgtacaatgtaacaattatgggagtacaagttcacctccacaatccgtagggctcgcggcacgctttccacaacttgatagtaccatcctcgctaccagtcccgtagagcttaccatcgggggagaagctgacagaccagatagggccatggtgacccttttgaacctctgcagaagaaagttagcttaactccatgtcaaaagaaacagacaacagccgaggtaacaaaacatacccaactcctcatccgtgttcaagtcataaactcttgcccaggtatcattcgcactaccggtaaccaaacgagcagactcgctattaaccgcagcactagcaacatcatagtcataatcaaccttcttaagcaaccgaccaggctgcacgccatcaaagaggtaaacgctcttcccggccgcgacagtcaaaatccccgcatcattaggtctcgtcgcgagactattcaactcgcaagagccaatcgtgccatcaaccccatactcaacgatcgggtcgcgcgaccgcaaatcccaccatcgaatcttgcggtcctccgccgccgtcgtgacgacattgtaatcctggttccagacgatagacttgatcgtgccgccgtgcacgccagcgccgatctcatagctcgccaccccgttctcagacgtggccgaagacgggagaggcggcgttgagcccgtgctggaactgccgccccgcgttagatcgaagatccgtagcttcttctctgcgccgcctgtcgcgagtacctgcgggtttgcttggattgggaatgctactgcccgcacgatgtgtgcgtgttgcagtgtgtgcagacattcgcctgtgtaggtgtcccagaccttgctgtttccggtgtcgagattagcatgtcattgtgggatgggggttggggttgcttacgctgagaaatcggctgctgctgtggctgagatggcggcgtcggcggagagccttgcttgccatacggcgcctttgtggccgaggaatgttccaatcctgggactgtgttagtactagcgtgcgttttgggcttggtttcatttgtcgtaccagtcgcccgttatgccatcgcgcagcatggggttattatctttggttggttagtggatatgcggtaaattggggagtcattggtctttcttacctttgcatgaagagatgaagtaatattgctcgtcttcgacggtcgaagagaagctcagatgcgtcaccggacgagaatgtccgtggcacgtcagaggaactaccttggcgatatctgttgaagacgtattagtaaacatacctaaatagtgggtttcaattcccatctacacatatcactcaccggcagtcattttgttggcgttgaaggaagttcccgaggtcccagtagttttgatgttaggtatcagatagccaatcagatcaccgaaacgcgatgtgcccaaccgagaggtcacgacttgatatgaagatacaaatccaggaagaagacccagagagtgttcaatatgtctaaggaaggtacataagagattcgtcagggtcgtcaagtcatcagatatgtggggttcgaggaagagccgagaacaaaggatcgaaaaaaagtggactgaacgacttttccaaccagacacctcgaaaaggagagaaagcctctgggaatatgagactccttcagtgttgtagatgggatatcgaatttcattttcaaacaataacgctggagccgatcatggattaggtaaggtataggctagtctgattcgggtaggctgagacacgtgaggctcacatatgctacggcagtttacgacgaaggtctctgaactgaccattgataggtatcctcaaaaagattataacaatatatttgacaaggcatctagaagaatttctaaaagaggatattaaaaaacatgctcagaatggcatcaaagagagacatgaaaagatacgaaaaggcatcatggattgaaaactatccttgagatacctaatacaacaacctctttgataccagctatgtcccaagttctagatgtcgccggtagaaggtcgactgtgcttgtagtatagccgagtgccccgagtactactagtcctatcctatccatgttgtatattgtgatttatcacgtgattagcttcacctaattggcagccaaccacagaaggtcccactttcctcggccccactcttctcttcctttcctccaaccacacgatctcaagtatactttactctgtatcgttgctatcgtctttcacttgtttctcatcatggcaactccaacgtatagtctatccttagctagtcataatggatcatcttttccgtttctagcttctcaaactttgtcacggtccgaacatttcagaagagcatacagcttttctagaacatgtggaagttgcattaggaaatttagagaactaaacgacggagtctcctccgatggtcttttttggcagtctccttagatacatacatacctttggccgcgaacctctccgctctaaatcacgtgcctacatgctaactatagtaggagctttgtactggcagaacttggggacggtgtatgagcagtcagtatttcggtccccttgtacatcttgtctattcaagttgggaatcaggtagaatgtacgatctttgatcaaaatgcacgtttctcactattggcagaatatgcggcagaaaatctttatagtggcagaattacctagatgcctcaacatctgggcagggggacaatagccaaacgggggtacatatatcaatcccctatttataagtggattaaatgggttcgttctccagggaaactggcacgggttcattgtatcaagtacagatcaaagcaaatgtatcggtatgatacccccaagcaagacggggtaagaggaagagtaaaaaataatagacacgcctcgttccctcattcttctcctggaaaagcgtaagccagacccaaagcaaaaacgaatggcaatgcaagcaagatgagagaagagctttcaagcaaaatgaatgggccggacgccttcgtctccgccgagatgagaagaatatggcaggagagagataaaaccaacgcgaacgcctgggacaatatgtggccgacgtgagccgatgtcatgtccttccgtagctcatgccattgagtagagagagattagaagagaagctaaagaaagccacataagacccttctttttttcgtactttgcatagaaataaacacgcattgcaatagagaaagccaataaatcagcaaatcctttccgatccacgcagacgatgcatcgagaaagatccaggggatagatgtaacaaacagggggaatcacgtagaataaagtagataacagctcgtataggtcctggttagggcaggcagcaaacacgcattagtgtgcattgcctattgagtcaggataaaggaacgaggtaaacgagaaagcaagaaatcacgagggtatgaaggtgtgaacaaagcgcaatggccgacagaaacaaatgcgctctcgagcgcctcgcaccgaccagataagaatacaagtttggcaatgacctgaaatgcaatcctcccaatgaaaaaaaaaaaaaaaaaaaaaggaatgtaagagcgcccaggttcccatgcaacagaaagacgaaaagccaagataaaagaaaaggacgggcagaaaaatcaagggggaaaaaaaaacagaaagcaaatccgaaacagtactcccgagagttatgcagccgccgaatgctgatctagctcacgaaacgaagatccccaaatgcgccagatatcccagttcgttcaaacatgccgggcattatcttaatataacgcttggatgggtttagcgacccatcatgtagtcagggtaaaaggaattatagccgttcaggttcggcgccgcattgttgttaccgccggaattagaaggaggcggcggcgacatcatcattgaattagctccatttcggattcccaggcccgagttggggttgtatgaggtattgcccatcagtccagcatgcgggttgacgggggtgtgtatggaggtgccattgcgcatcggcggcgcaggcatgggcatgccaagaccagggggtgctgccagtccgggagggggaccattgacagctgagaacatgttgttgtgaattccactcaagctgctgcccccagggactgcgccctgtccagaggccgagttggatgagttcatgctgccaggttgaccagagcgcacacccaaaggattctttgagaagctgagacggatgccagtcttgacactgttcgacagcttgtagccgtacaactcattcagcgctttgctggccatggcgacctcgtcgaattccacaaagcacatgggtccgttctgcttgtttcggaaacagagtcgcttgtacccgcgttgtttggagaaaagcgctttaagttcctcctcggaggtgtctggtggcaagttgcccacgtacagagtgttgcaaggagggtttaggtcattcgggttcgcagcgggaaggctgtggcgtggtgtgtgctgggcgttgtatgggaaactatggccttggttcgggtatgcagatgcgggtgttccaccgcccatacgttgcgcgccacccccggggtagttctgcaaaggtggcgacatgttggttgacagggacatattggcaaagcggttggtcgggatctgagggttggtggcccggcgtccggcggagacattggtagaatggccattctctgcatagcccaccggatccttgagcagctcgcctgtctcctcgtccgggtcttcgtcaatcatagacttcccggttatgcgtgggaggttatcaatgccatttccgatcggagattgtggggagaaaaggctgtgcatacgcgagcctgattccgaggttggaggaagtccttcgccgataggctggttggggttggcgttggagagcctctctaagctctggaaagtgccgttgaaacgcgacgattgacgcgcaagaggaccgttcgaggcacccatcagcgcacgactcgcggtgtgatcgatggtgttacggcgcgtgttcgacagattcgctcctatcgggccggggtacatctcgacgaccatgttggcgtcgtttttggagttcggtttgccatcaaggagagacctggcctcttcggcggcttgcaaagtaatgaatcgcgcgatcgcggtcaagaacccgtcatcctccggcaggtccaaggtcacaaagtccgcgtcgacaaagtctttggcgaaaagaagcatgctacgcagggcttcacggctcgtgtttcgcggaagtttgcgcatgagaatcgcgcctccgtttccgcgattcaggccattcaggccctggaggttgcgatcgttctcgcccaagcgcatgttgttatcgaatgaagctgttgtaccgataggggagaaagggtatgagaaagatgggttcatagatgaaggcgcttgcgacgcattcggactatacacgtcggtcgacatcgcatgctgagccgtcaaaggcgcttgcgaagaagggagtgactgttgtgggggtgaaccagatgacacggactctgtgagctgcgtagttccaaaagagccgggactcgtacgagtggactggctagagctgccgctcatccctccacgagattcgaaaatttttgaagttttttttttttcgcctttcgggggttcgcgatcacacaggggaaggtagtccaggtatgaaaaaaaggagtcgcgggagttggaaagtcgaagttcgaagcagtaatcgataatgcgacaagagatcgtacaccaaacgcgatgcaacgatagaaatgaagaaggcgaaaggcgaaggcgaaggcgattagcggttcgatcgaaagtcgagttcactcggatggtgtctcatcggatttgcgacaggttggactatgagcgctgtgaaaacgattgagataaagatggaaattgactagaatggtaagatggatgcaaaagggagaaaggtttgaaaggaggggatgaaggagagtgcaggggagggggggggaagaaaagagtccggaacggtcgagtgccagtccacaagtgccagatccatggatctgcccttcacgacgcgactcaatggggaacaggtatgtgacagtggaggtacatggggttgtatgtggatcctcctattaggagatgtactctgaagtaaatgacagtacatagtcacatcattacacaattttacgtagtcttacacccttagccctggaaactgaccgcatgcagagagttgccaagtgcgtgccccgaggtgacttatggtgaactgtggaatgcccccggttcttttctttcttttcttgatgttctcttatatattagatcgacgggtggatcttgaatgtgtctcttctagaaaagcaccggccatgcaagtgcctatgcggcttgccgtacggctctgcacgcgattggggctctatgaaatgaaagacaatatatcacagggatgttattactacaacataccttatggacttggtagaccaggtatttccaaaccggtaatccatcctagtacctctaggcggtttattggatgaacctggaatacatttacaactgccgttagccgggccagatcataagagccaacggcttgatattaaatatcatatactttccaccatatgtcaatattggagtccatctacggagtaacccattctataaaactaaaatacaaaggtcatcacacacgtccacggaatcacaaaagtcaaaaaccggcgatcctccagggtcactgaccaattgccacgggcccaaccccggtaacacatgggattggctgccacggggaaatgacttggcttatcgagggggcgatggttcatctggttgggccgtggagagaagctactgcctaggggttttattagcactacttcttcaatgtgcctgaactggtcataggcgcgtcaaaagttttgactttcaagtttactgaatttgaccaagttccaaaggtagctaggtatcttccgatgcatttaagattcacaacatacttcgtttgtggtttagtagcatctatgactttacaatgtagacatataggtgtgagcatgggcaagtatgctggtaacgcatagcctacctcggtacggttgcctgcccgatctaggcaacatgtgcccttcactgtaaagacggagtcaaatcgtatcagtagatattcatgctgcggctcatctaccgcgtagagtcagagcagtcaggctgccacataatgtacaggggttcccacaaggcaactcaataacgccaaaaatgccagcaaaatcaggagagaaacaaacagaaatacagcacgactgcctacccgtcatcgagggtgccacgtcttgacctttccaaggttctcggatgttgtccggccgagtacacaaagaatgccggagggcagaaccttgggaaactatgtaaaggtcaagtatcaaagagtcaaggagtcaaggagtcagacaagcagaatcaagctttgtcaaaagtagtaggcttgggcgcaacaaggccagcctagagtgaggttcaagagttagcaaaagcagtccgtataataacaacgtaatccccatcattccatatgatctgctaagaacgcagacccgacaatagccgcccatctctctcggatgctccgattcccagaactctggcggataaagaaaccaagggtcaggcttaccatgcccatcagcttccagacgggatcactaggctgtgcgccgacaccgagccagtactttgcgcgtgaccggtcgagggcaatctccttgtatgggcgggcatcggtattctcgccgtacaagttcgtgggacgcttcgggatggggttgtaggtgccgatgacttcgaggggcttagcgccgcgggcggagctgaagatagtagggtcaatttcaattcttcttaaagatacagtgaatagcagattgaagcactccctagcctggcaactccagtgtttggcgttggagggcgtatcgggggtatccattcacggggaaatgaccacataccgggcttgcgcaacaacgatgttgaagaaggggttgtgcttgttgccaaagcgtgctagtcgaatccggacaaccattttcgcgggtgtgtaatgctttctcaattggaaagagcgcaaggactgttctcttgatgatcccgtctgccctccgcaaaagttctaggatgtccggaagaattattgatccgtttattccaaatatggactagcgcatatatgatgtaatggtgtgaggaccctcagtagatctacttcgaagcttggtgtcactttagtttacacagtttctgtcaatttacccagttagcggaaaaatcagcgctgacgctaacaaacttatatgattcgttctgcattcactcatcttcgcctacctcttcctattcgccgctactgtaaaccagcgataatgtcgttgaaggtactgttgtctgatattagccccaacaacatataagctgacaattattctaggcaatttcagccacggatgctgcatcccttgacaaagacctcatggagataggtggctggtctctggaccagttaatggagctagcgggcctttctgtctcgcaagccggtaacctccatcgatcttgaacatacactcagcatagactgatacaatgagcaatcagtatggaaaattcatccgccgaacgcaggcaagaatatcctagttgtctgcggaccaggcaataatggtgagaaacaccgctgactttgccattccgagcaacatcagcctaacagatcaccaggaggagatggtctcgtagccgctcgccatctagcccattatggctacacaccgtcagtttattatccgaaacagggcaaaaacgagctctatcaagtacgcagcccctcaccagaagaagactagaaggatgaaacatgaaacgaacctaacccaacccagcgcctgagaatccaactcgaaaccctctcagttcccttcatagatgacttccaatcagccctaaagacgacagacttcctggtcgacgccatcttcggcttctcgttcggcggagcattgcgagatccgttcggcgaaatcgtcaggcaaatcgaatccgccaacgtccaggtgctgagtgttgatgcacccagctcatgggatatccagggcggaccgccgaaggaaggacctggcgcgaagtttatgccacatgcgctgatcagcctgtctgcgcccaagccgtgtgtggcgttttatcggggcaggcattttatcggtggtaggttcttgaccaaagacattactgataagtatggacttgatttgcccaagtatcagggcatcgatcaggttttggagattggggttgatgcggaggggagattgtaaggcaacggtgttgttgagcacgctagttgaagttgatttaagaatgaatgaacatttacgacttatctagtgtgaattggaagagaaggtaatgaatagccattgtatgggaatcgcgttgtcgtcgttaggaggtaatgcatctctgatctatgcataccgaataaaaatagcacgtactctcagagggccttccggatctcgctaataatgcccttgatgcgcggctccttcccaggaccagaggccgaggctttcgagagaacactttcaacctcgtagacctccttggcggcgctcttaacctcctccccgagcgctgtcaccagcgtgccgagagcgactagtgctcggtagaccgcctctgagtccttctctccagcgacaatccgaatcagttcctccaggaggaccagacctcgctctgcagattctggggattggttcctaccctcggaggtaagataaactgcgaagttgatgtagagtgttgtgatggcgatggtaaggttgcggtttggtgactctccgctgctggccaaggcagacttcactcctgccaagatttgatcaaatgagcctatggccagatcacggccggcagtggtctcgaataggttagcaaatgtccgcattgcgagcattgcattgttgacgttaagaggagattcaaaaacaccactggatatcacaccggacacaacattttcatctttgtactcggcggatgctgtaaatggtgcagcagccgctagtagacggagaatatctaggccagggagtcgtttagcagcaggccaggttgtggcgatctttaaaatcaatggcactccggtttcaacctcgggtgaagcttggagctgttgggaagattcgagctgaccgcacagggcgacaaccgtttccacctccgaggggctcaaagccacgtcttttgatccatcagacacgagttgcgcgttcaattcctgaagcttctttgtgataactttgacgtttgctgagcggatggagagataggttttctgcgggagcaccttagggcgcggctcggaagcaggtggctgaggctcttcggtcggtgcggcgtctccgggacggtaacgtcggtctgagccccaaggatcagcgcctgcgggttcctgagactgcccaatagtggcaccttgagtattctgagtgataaagttggcaacctggtccaaatacgtcatggggagttcattgtctccaataaacttggtggcagcctcatatggattctgcgtgacattgtatggtagtttcagcggaggcttgccatcctctatgtcaacatcgaagacatagtcataatcctgtccatggtattcggtcttccgaccactgcttccagccgagtccactaccataccaatggcaacccattcctgtgttgccgaagaccaagtgtgggcgctcacagtaccaccaggctctcggatcatttggacctgaccttccttggttccggacttttgcttgagaaattcaggtccaggtagctcctctttattaatcttcccaacttgctgctctggaatagctgactccttgacagcctggtcaaactgctgtacggcctcgggggctgcatgacggtcagggcttctgctgaaaacacgagcaatgcggtcactagcaccggtgacgatatcaccggtctcactgcaagctgcgacactccacacagagattgcgggatgagtgatagtctgcacacactgggtcccgctccatattttcacggtacgatcttcactggagctcacgagctcgccagatgggagtgccgccaaggagtagataaagctttcatggccatgcagagaggcgacgagtttaccctgcagagtataaagacgaattattccgtcattgctagctgaggcaaagtgggctcctgtagagttcgaggtcggaagcttgcacaaggcccggacaacgtcgtttgagttctgtacgcttccgagtagggttcccgaagtattgaacatccgaatcattttgtcagcacagcctagcgtgaagttagtatgtaagacttattagggccgcacgaagctagcatacccgtgatgattgtgttctcgtcataggccagcacggcccagacacttgcctcatgtccctccagtacgacatcacattcccatttcccgaccttccatagccgggcggtggaatcccagctgccactcacgacccatttgccatccggagacacatctagagcacagacattgtggccatgacccaggagcatagcatctgcattatcttctgcacccttgccaggctgtctggcttcaattattgcgtcttgtccagcggaaaggataaggccctctgggaactcggatgtgggaggaatgtaggctaagctgttgatgaaagcgccgccatgtgcagcgatggtatagtcatatgcgggaggtggagtggagacgagcttccagagccgaactgttgcatcacgagaggcggaaaggacgacatttgggtttgggaagaccacggcgcgaacctagatcagaaatcaaaactgcgtgagtagtctgtgtggtttgggggcacggtcaacggcgtcggcacagacgccgggaccaggagccttacatcatcgccatggccttccaaagttgcggagagcttgaagtcaggcatacataaaacttcgagagaagaaacggtaaagaaagaagaatccgaagaaggaatatttcgagggtataacacggaattaatgattaatcaagctcccctggatgttgttgtcctttagtcgttccgggggatcgccccgccgaagcatcaatggtaatatcacgtgggcggtaacgccagggaacctgctggaacacgccgagatcttatcaaatgcaacaggtacggagtactacgtcgattttgattggatctcctaccactatagaattcattacatgctcatgtggtcctcaagaccctatccactatactggccaatttcctatattgacccatagcgtagtaataatagcttcccagtggttctgactatatctagtagatctttagacatcaaacttactgtagcccattgttgacagctctgtgctttatatttgggcttacaactaatacgaaataggattggaaaagatcattaatctgaccgactaaaaagactaccggagaagacaacctgaagactacggccggataagcggctgactatatattcctgtggcagtatgttcaaaagggaggcggtattcatgacagtatataacggacaggcggtacatagggcggtaatatgtaggtacaaaaggtttagcccaatatttcggaggttccgccgtccttgcattgcaattatattcgaatgtgtgttcctatgaagtgtttactttggttgtatacaagtggagatgataccacgtgactacactaccgagaagtttcttcccctgccgacacctacacttcccgctccaacccgacaaactcccatccttcaattattgctgcaaaagggtcaatggcagctggaactccttgattcttaatatccagtgtattccatccagtttaacgttaaattttccttcccattcccccatcatatcctccaagatgccaccccggatgcaaagccggagtgtgtccaacacccttcttccctacctcacatctagctcctcttcctcatcctcactttcctccattccttcattatcctctgcatcatcacaatgcctttcgcgtcaattttctgccacggcagcaccacaggcacagaccaagcttcgtcggcaaatgttcgaatggctcaacaatgaaggatccgttttcaagcaccacgttcctggcgaaaccaattatcttactcgcttaaaacagcgaggcggcaacgagggctcagaagcatcccgtccattccccaacaaccaacatttcatcagcgagcctatcctcagtgaggagctacggaatgaagtctataaccgcgtcatcgaacagaagaagagtgtccgcgttgttagtgtggagcttggaatcgatatgaagcgtattgctgctgtcgtgagattggtagaattggagaagagacagcgcgcccaggtatgagcctcgtccctttctgcttcccttcccttttggactttctttcgaccctccacgcatatgatgagtcacaaaaaatcgattagtcttgaagacacctacatggttaaaccttactttttgaactgaactgcgttaccgttaccttttggattcctatcaagttttatttggtcgcgtgacatgaactgacgaatctcaaatcagggtaaacccctagcactcccatatgctcgggccgtccacgagatggtccccaccacacctctcgccgagaaaggcgagcgtcaaacatatcacgaacccatcaacgacctccccgcccaccccctgacaggcacccaaatcttctaccccgtccccgaatcccgctccttcgaccgtgtcgaggcgggtcgcgtcttctccggtgccccagcgatggagcactccgaggccgcggaaatctcccacccctccgacctcgccgaaaagatcatggaggatcccaactccatcggctgggtcggcaagggcgccaacgcccgccagatcctgcaacctgctgacgtacgcattcctcacccacacctggttgcccaggagcgcgaccgcctcgcgcaccccaatgagcgtcgggctgttgcggatctccaatctaagagactcgagcgtcaggacgcactcgagaaagagcgccgtgagcgcctccaggctcgccgtgagaagaagacgactattgtctcccctgaggagtcgcgcttcgactaccgtatcaaggatactatctacactacagagactactggcgttgatggccgtggttcgaaggctactggtcgtcgctacggtgttcctcaccgtgaccgcacacgcggcgaagtcaagattcctacccgtgtggaggcttgatttatctcagaatagtgccaggctgtttctttctttttcttgtgtttttcagcaactttcttggctacggcctttgtaattttacttgtacgcatactcatccatggatgtacgaaggaggctgtcacttatgtacctatataccggataatgtcgaaacatttctcctttcattttggactccgaagtctcccaggttgcctggtcacgacgcattgaacactcacgtcttcgcccagccctggagggtgtaattcgcctctttgtatgcccacctgggtgaatgaccaaaggttatatagaaaggtccattttatgagttaagcctttttttggccctctcctgctatccacctagcaaactgataagtgggagaagatatctatataactagatacatatctagccctaacataccagtgattgcccaaggttgaccatattcccgaaaaatagagtctcgaatactggccaacgtactgaactgggaaatgctgacggaaaaacacgtgttgagattgagaacgaccttctcgaataaatgttgtcagctcgtcgagaaaggctggttctgtcgaagcacatttaccgcgcgcttctcggatgcttgtttctcgcctctcaaacacttggtcatggcactttctttgtgctatttctggactcgggttacattctcagggaaatgatatacttggacgagtaatcaaaattcttcttgccttcgatttctgcctatctgaccccaggaattcatctgaagctattcttcattcctatccctccgcctgctcaactgcggccatcatgagtactatatatacatgtacaaagaatcggtcctatccctattcaaccccgaaatcccgcaaacatcaatttagtcggtaacatggatgtagcggtaaggcttggccgtgtaactgccaaccttccagccaacaggacgcttgtacgcaacacagccgtaagtgccacggcactcaagggtattgtattccttcttagaactatcggcccacgacttgaacagagtgacgtgaccagcagcaccgccagtaccagcaccaagagttccaacaaagtcaccaggcttgatatcgtcccaagagatggacttagcaatgtcggggagactgacggtgctagcacccggcgaagcggcgtgcagagccatgctaacgaagccggagcagtcggtgcggtacttgcggccctgagggtccgggtagtagtcgctcatggagtatgggacgtggcgggagacccagtactgaccgcgggagagaatctccttgcggctgatcttgccctggtaggaggagctgccgtcgccggagctgccgccgtcgcaggactcggtgaccatactgtccgagccggtcttcacgtagtagtcggcgacgtaacagttgtcggatgtcttgtcccagatggtgttgccgttgatggattcgccgtaggtctggcaggagaccttcacgtcggcgccgcttttgtatgttttgacgactgagtcgcttgttgaggggccggagcggcagttgagttgatcgctggtgatgggatatgcgttggcaatagagaatgccgcggctagggtcagagccaagttggtgagctgcatgttggcaaatagagcgagttggcaggagagaaggcaatgtgtttgaagggctggattgttgtgtcgagaatgttgttcgtcaggtcggacttggatacttatacattgactgctgtgtcgatctttgcccggtgctgattagggtgggatcgagtactatcacgatacggagtagtcgagaagaatttgtctaaaattagtgctagaagcaggacttggatcctctcgtccgcagagagctcgtaagttagtctcatcttctcataatacgaggaagatgccgaaaatcaatcctaccctagggctactaaaatgccattgcagatgaaacgtccggggcgaatacgatatgaagccctaaaggtccggatatgttgccaaaaatagtcccgtttcttcacatcggcctcgtatacaagccgcaagggcgatcggcagggcctaaccaaacacgaggtcgaaagaaaacacgagattacttggcaggacgagatcgacaagccacttcgatgaatgagacgaacacgatgtaacaattattttccgaagatgctaaaaaaggctcgtttcttcactttagcctcggcccatacgagttgcatcaacgatcggcaggactatacctttagaggatgcaaattgcgagagaagaaaacatgaggttgctttttaatatcaacgaacgagataaaaacgatttaatataatggattgtctcggaatagatattctatgagataccaagagctcgtccttcaactttcattcccatcagtacttcgtactcgttgagcactagtctgactcccaagcattcccttctcagctgaatatctctttcttgtagaaatacgaaactgattgctgtttagcatattacgctggctatattttgatcttgttagatcgtgaagttgtcgcaacgcgatgtgtacatgtattgaaggtagccaaaataggatatatatagtcttagaacttgatcagtagaggtaattacaagcagatctcatataatacatatcataatcaacctggaagaccaagcaaaagctcccaagggcgtgactgactgtggttcctccaacaagtcggaggcttcgcctttgcttcatcaaagcccgcaaagctcttgatccgcctcagctgcttccctaaagattgcacatttaattgtatggccttgtcaagaagcaagcctccccaacacccctcagacgcgtttcaaggtcagtggtcaaatccttcctagcctctcgctcttccatctcatattcatcctcttcaatttcgtctttgttcctactccaccagtcaccatgtctgcctacatccattgaattgcttgcttttctggctctcgccacatatatgcaagctgcctcgaggtaaaatagcctcatctcgtccaacacgtcggcaatcctcgccaagtgttcgacatcgtcgacttcccctcctctttctcgcgaagtaactttcttcatcccagtcgtcgtaacagacacaagtgcagttagcatacgccgtatcaatgagcaatttccgctggcggaatctcccgttgtgtagcgcagcatcactcagcagtatcaggtcccacaaagccctggacaggattggcatagttaataaaatggatagttactagtttcatgaaatgttctactagcgaaatacgatatggcgcactggtggctatacactgccgtacgcatggtttaggctgagatagtgtgcgaactaaatgctcctgaagtctctatggacataaataacagcagttatcaatcttgataatgtgcaagtagaatggcgtcgtcaaatcacccccatattcataattctaaatcattgaatactgtatggatatcatatatcattcattcctaaccagtcctgcaaacacttagaaacaaagaaccacgaaaatataaggactagaaaccccgagatattaaaagcaaatgcacagcgccttaaatgaaaaagcaagaggtatatgcccaacagtccgccattccattcagcctccttccattcctatcccgtttcaatccttctcatgcttagggactaaccaaacaaccagatggtcaactctcaacgagcctccccgacagaccgacagcgtcgccttctcgctccaacccatccggagatcgcgtcggattcagattcgtcttccttggaggaagggttgaaaagggagccgattgaggcgatggcactttggatccatgaggtagtagtaggggaggctggagctgatggtgtctttgatgactgcatggtcgagctgagtgagggggtgaatcgtcactggtgagatgcggggtatctggtttgtagtttgtagtttgtagggtgtgagaggaggtcctttggtaaatggtatattgctcgggagataatgatagacgatagacttgtgtgtaggatgtttataaggcgtagggtgtaggtccgcgtatggagaatatatggacgtagaggatcgggggcaagattaaggtatttaaggaatcaaagacaataggaacatcacatgcaggacaatactcagtaagcaaagcccggaactagatttgcataagtacataaaagcccggacttgatattatttgctattctaaaagcttctctgggttgctcctcgtacttggggtcatgttgcttcctcgtgattggtggtatgatcacattgtgcagacctacctatcgacttcgtatctgattgacagccattggacgagttcgttgctttaagagatgttgtgttaccttggatgccggagattctggaaagggatatgggttgtgtacaaggtcgaagctaatactttgaatactatggctaaatgtatgtatacgaatcatcgctcaaatgattagtgaaataagtgcaaggaaataccaccaagccccccagccgataatcggaacgaacaaagaaagctatacattgaagagtataggcacgggacatctcggtcatgtatatgagaatacccattgcatgacagccgtatgcaagagtgaaaatagtggacgagacaaaagaaaccagccacagaaggaaaagacgtgcgtatgtagcagaaataacaagacagatccatacggccaaaataagattcacgagctgcattaggtttgagaacctcgaagtgaaagtgcatgctaccatgacaagaagatggaaggacgagatcggaaaagacacgttgctatacggggtattcaatgagagagacaggaagtcgaatcaaacaagtcggaaaaggatcgatagaagcgtatagggaccaaggcatggtaacccatccaaagacaaatccgtcctcatttcccacccggaggcggggccgtcgcactactgcttggtacggtatctccaggtgttggcaactgcggactcgagagcgagtctaggctgtcgggactgccgctaccccatgaatcctcccgcatgatttgcgcaacatctggcaggtgtggcttggcttcgtggtgatcggacttattagcagggcgggaggtcgagggcgatgggggatccacctgtggtggttctttgcggtagccaccttgcatcgggctggctgatgtgtcaactggcgaggcggggcgaggagagtccaagaagccgcgccatttgcgccagccttcaaagtcaattagggcttgcatgcagccccattctgtcactttctgctcaagccaagggaatccgacgggctattcgagaaatgttagtatacctttttgagatgcaaatggtcgcagtagggatccgacttaccttggtcaggaaatcgttgcatccagcagctaatgcttcatgtctgtcactttgcagactgctagctgtcaatgcgacgataatgactggactccggaacagtgaaagatcggacaaagtgtcctcttcactgaccgtacggtgaaggccgggtcttctgtccgcaggagatgtactggacgcgctaaagcgtccagaggctgtcttggggaagacaccaataccatttaagcgctccaggcgccggatctccttggtggcttccaaaccgttcatcacgggcagctggatgtccatcaagaccaaatgaaatccaccctgtcgccatttccgcactgcctcttcgccgttcattgcacatttccagcgcactttcaaccttttcatgaaggcctccaaaagcttctggttgataatgttatcctccacgatgaggacattgattggcggaacggtaccgtcaatcaacccgccaaacatagcaccaggtgaagtggctgcttttgattttcggaccacgcgtggtgatgcagttgccgggggagtgtgtgatttcacctgcggagactctaccggcggtgctgacggtgggggtgtaggcactgcgggagcggagggaggcgggataggttgggaatgaggagtagcgccggtttctatggatgtcagtggccatgtggagcaaaagcaaagtagtctggaaacgtacccgttatgccaggagtttgggtattctggttatgaagaatagtgggagaatttgttttgtgtcgtgtcaacggaggtcgttgctgatgccgtgccctacggcttcctggagatggcagtagaggaggagcaacaccagtgttgagaatggaaatcgacggcgcagtagccgctgctgatgcagaccccgagtgtgcagagggtgtgcccgcattcgcattgactggcggcatgagagggaagtaatcgccatgctcgccgggttccgaatggtgctggtagatcgaatggcgcggcgatggctttggggtgcgccgtgacggtgcatcgatcaccaatgcttcctcgattttttgtcccccaggatagtatgcatcgagaatagatgacagggcttcctccgggctcaaaaggcgctcagtgtgacctggtcgattcgtaccctctcgtggcgaaacccggatagcgatgtcgggcgagtcaaagcttctccctagtgagtttccgtacttcataatgacttggtcgcgtagctcatccaccaccgcatcgtctctgcacggcaccaaggtggccgatccaccgggccgtttgacccaaacccgacgtgtgaccatctcgtgaggaacaaggggagtgaaaccactaccctggtcacctgaagagaaaagactcgcgtccagtagcccgctaatcaagtgttgctgtgtcgctggaagaagagattgacgacggatcgcaaggctcgggcgcttgcttgatggaggaaagtaggaggtagaaggtcggcgatcattcgtaggccactcgacaacagtatccaaggctggagtcaatggagtctctggtaggattggagtttgagctttcaagtgggtggactggaaggaggtggtatcggaatgcggaggagtcgataacggaggggtttcgaggggagacggaggatcggccgagataggagtcggcaaggaggaattatacggctcggtcgacggcgtacaattgcgagtccctgtgtgatgaggttgttccgaacgcgtagacacggaagaattcagttcctggtttgtccctgataggggttccttgacttggcggtcgcgagaagaaccgatgtccaaatttgaagatgcgatgctgtcggatctgttggagtcaagagggcgcgagggggttttctggttgaagtgggcactcggatccgcatccgcttttggagataatcgtccaagtaacttcgccttcagacgtgatatccgttctggcatcgttgggtcttcatttctgacaagtgggagaaacacaggttgtcgttattctcccggataaggaaaatttcggagttttcgtacttttcgactttttcgtacttttccgtctatatagcttcaaaaggcaaagaggtcaaaggtcaaagaagttgagaggggaaactgggacttgggagtcagctgggttagttgctgatcttccggccaaggaaaaaagctatggccttttaaggctaatgctggactaacctacaaaggactgggggggttatttgggcatttggggtagacaaacacaagacgatacaggagaatacatatatcacaagatcattaggcatctagattgcggggttcttttctgttaggcgaggtgcatttcagctctacatatatacatagcagtatgcataggagccttaagcttggatatagcagtttcattcgcagaacctccagggcttgcgtgaactgagcatagttaaaccaacatgaaaaccatctgattcatattcaacataaatagctgaacataaatgccgataacagtatagccactacacacaaaacgacctagatggcacgcccagaacaccagtgcttagccagagacagggccagtgggttcttagggtcactggaacattccgaagagctgcatctgcggttgcacaccctaacaagatataccatccatcttgtcctgtcggttgggcgtagaagttgacgttgtcctggttgcacacaacatatttcccatacaaagtccacacattgctttgtggtgccggtacgcttgtgttcgtggcaactgtgttgttacttccctgtcctctcggaatggtaaatatggctggacaagccattaagccagtatcgctcaatcccaacaaattggtgtcagaggccacgccggctgtcatgaatagtatgtcagactcagtggtggttgtggttgtggtattggtattggggtgagcaattgggacatccgtcatgaggactcggaggtcaaggcctacaaaaaactgcgaacttgtttgctgcgctttgacagtgacagatcaccgatctgggcttgacctattcgaccaatattattaggtggtgatccattcaaaggtgggagatgtttaccatctgcatagaagacaggcgtcgatgctcttgccatatgcatactttgatagattactgccgtgtatccagagtttgatcaagacgcattcgaaatcactttctatatatctatgccccggagtgccttgctattcccttgaaagcgcagacagacgaacccagggctggcttggatattacagaatccttgatcttctcatcttatacttcggttaattctccccaaggccaagacaaactagttgtatcatgactagcgacggaaccttggaatatcaatacactgactaactgttaactgaaacatagatcccatccgtggtgctctgcaagaagagggtgttggagatgaggacgaagaaaggtagatatgacacccgtggatctcttggaaggcaccactcattctgaaataggaaggaagggtctgccacaaggtaagagcgtccctggagttctgtataaggaaggaacgataaggaaagcgagcataaaaggaacttcaagtccagacatagcaacccccaacccccatagctcagatgggaagtgccccgggcagggtaatgttaggttgcgtgttcgaatcacagctaggtcgggttgaagaactgtgagtcacgggctgacgacagggagtacaccaaccccatcttgaaaagggggctccctgatgcctcaacgtcctgagcgaggcgcgtcctagccgatgaggaaactgtccctagcctagctgttgtgaagatccttggggccaattttttttcttcttctacttcgggatcccttgaagctattcacacttttgacccaccaccccactgctacgtctcgtaaacaaaaaaagaccaaagtctgacgacatcatcaatgagctgatacagtaccgcagtaatgcaaatatctagcgattatcataacgcaaagtataatatagttatttcctgcttatatgctgccgtactagagtaccgacatcgtttgtctatttgctctcctacaacgtaagtacacagccccagcccccacctttctaggctacatatagcgctgagccagtgcccagtcgctactgtgtatgaatataaagagttggagtttaccgcccgcatgagggggccaaaatgcggctgaaaccagggcaaacatcattcgggatcgaaccttgcctttcattttctcctcatttgatgctatctcaagcccggcaatgacaaaatggctaccaatatgacagcagcatgtctggatccatcagaagcgttccgttctgtccacacgctctctcattgcttccagatctttggtcaccaagacaacgatttcttgagcagtgatgattacaagagtcttttcgtgtatccaaatgacaccttcgggcttatgattgacgactgcatgaaacagtattgcctcaagcccgatgctgaactacttggttgcgcgggaaattctagttttgtcaactcccctggaatcggattaagtaccttacttgacccctattcatatggcatggtcatatctcctttcccacatttcatggcatctggttgtgattttgttaaattggacttgaatgaggatatctctggctccggtgaaatcctctcctatcgccctttgaatcttgatttcaggaaaccacatgactgatcgaggtgatatagatgataattgcatatatcatgcaggccctgattctgttctatgtctggctagtcatccaagttttacaactggttcacgtctgcacacaacgtctttctcgcagcaagcgaagaagctaacaaatgccctctgtctcaagagatgcaacgctctctcatcatgtgtcaatcatcaattctatttctgtcgacttccaggagtcccaatgtttctttgtcatctccatccaggccgccctgtttgttgccttatctggcgattcgagtgtgctaggtgcaactaacctgacacaacttcgaacaaattttgcagaggccacagggatgtcatcaaagtttatcgtaagagtggcctttggcctatggatcttgcacaggtctcatctggactcgacatatatcttgttttggtccgtggccagtattgtcatttcaacagttgcgttatttagcaagacgtgggagcagccgaatatcactgggatcgatcagatttccgacctcgatcgtttagataaatgtggacacaaccctccacccatcgtctactgcgcaacaggccctatatctatgtctcccttcttccttcactttggtccagtggatgtcttctatttggggagtgctggctctccaaaaaattatttcttaccattgtttctttccagcttactcccgtgtccaacatactattaagcaagcccgagagtccagaactgtccggattctctcaaggttatggacggtgctagcggagatgtaccttcttggcgtcaatatcacgttcgttctccccgacatactgcaattctcccagagatcgtattatgccccgacagactggactttcggtcaaattatcgcagtgacaatctgggtcccaatgattaccagatacatatactggtctatatgtacgtgataggacctatgcaaccctgcttgatttctgattactgacccccagcaagttggcaccgattcttattctgcgactcggctctcggggcccttccatatcgtacaagaggaggttaaaagcgactcgccgcactcgcccggtggtgtacaactgtataccaacctacagtccaacagtgatttagaaatccggataagctcgaccaggtcccggacatggaactaatatctcacccgatatctctgtggtgcgagtgtataccactgtattattactagttagcacccttaagctatcggttctagaaattatatccggactagagaccttctaggtaataaagtatggatcctataatcctaagcgattataactaccgtaattctaactatcacactacagtggttccactagttcaacatagtctaagacagtctctctaaggtttcctgacctttctcatccagattcgggtactgtcttagattacacatgtccgtccaaaatgccttagcattttcgtgcgcctcgccatgtacgctgaagcgctcccggagcaaccttttccattcgacatccatatctgtaaatccaaaagaggccgaaacatactcataccaaataggaaaaaaggcagcgtgtccccagtcgagtataccaacaacctttccgttttggaccatgatatttcccaaattgagatcgcaatgagtgagcacatagggtccgcactctggtaagcgcttcttcaagttctccaaaacttgttgagggagatggcgaaggttaagggccagggcatcccagagctcttggtcagagtgaaacggtccgtggggttcaagatcgaaaaacagtaagcccggatagcatggactttgatcgacacactgaatagaggctgacgtgacggatcgaagttgttttcgcactttgacgacttgatctgcgatatctatcttttggggttctgacaaagaaggccatgcctcctcgagcgtttggccactaatacgttcgttcaaaatgaagtatcgcccatcgcgatcgacccagtctcgtagaacctttgggacggggacgtcggtataagtcgccagatggtttaatgttttgacttcaacttttgattttggaccctcgtctggccgatctttcaaaatcacatctgagccgatggaccagacgccccgcgtagatgcgccgtagaagagtttgaggtggctagtataatggcaccgcttttctttgtcaagtgtccacccgcatgcgatacaaccattgtcgagtggttcacccattgcggatagagtcgatttgttgcaagagatggattttaacagaggattgaaaggagaataaagggaaattttcagaggggaggcccttgctcagcactgcatattttcgagaccgaccgccattcaattggtgtcacaggtcccttatagtatcagtttcatatcagtcctcttgtttaacaaactacttatatcgtaagcttataaggcttttattatatcgctcggcttagtcgatattaagcacttagtagataagcaaatcatgtaaagaagttttacttctggagaacctataaggtagctcctaggggggactctctccccgtcctatcatttcgttctttactttctatatctagtagccacccaaggcatcacttactagccctggagggcttagcactgctttgtaaagcccactataggtaggttctaagtagtaagcgcttataatacttataaaagtcgcttttgcttctcttcgaagatctttatctactattagtagtaggattaaggttcatattctggtaataaatcttatgattcatagtcaaacagatgcaaacgtagacatcaaatagggcacgtagtctatataataaaatatattgtgtgctcgaaatcagctgggtgttctagaactttggaggccccacgcccaagtgtccaggtggattcgacaaattacgtagacgcacacgtagtccacgggtaaacgcacaacacggtgaattgcactgtctacagtcaagacatcgctatcctagcatatagacaccatctcacatgtttatttttctttcatgtacggagtagaaaacaagtgtttcatcgggatcaacagaccccgattataaaccctattccaacatgatcatggagaatagcacctcagccatgaaggagcataaaggaaagacacaggataaccacccgctagagcaaaaacccaaaaccccaaatcacaaaaataaaagtaccaagaagagaaaggacatgcaacacagaacagaaggaggccatcaagacatcacgttaaaaggaaccaaaaaaatacacacacacacacatcgaggttggatccgaagggtatcaaggggaagggaaaacagattttgcgacagaacaaatgacaaggaactcggacaaaaagaagagacatcatgcatacggaccagagatcacagaaggatcagatagttcgagggcgcaatgccagtatctccattttgcttccgagcctgccaccatcggccgctcacatcggatacttccaagatctcgtgtttggcgaagctgatttcattggcgtcttccgggttggcgtcatatgagtagatcgccttggcccggtaagggtattctgttggctggggcacttcgcctacttcttgctcgccgttacccggagtcgagggattgggggtaccgaagcgaggcgcagaggatgctcgttcggcgccgggcgcgccaccggggtatccggagacgggggacgaggtctcgaagccgcctagttgggcggaggtgtacatctgcggggtgttgttggttgccacggtatctgggcgggcgccgaatgtgctggacatggggcgactgccgcggtaggagggatcgcccggctgttccttgttcagggcgaacgagtcgatgaagccgcggtgggtggcctggggtgtggagccgaagtagaagatccagaggatgatgatcatggaaaggagaatgaagcctgcacctgcggcttgcatggaggcttgttttccgtagatcaggttgtttgcgctcgtggatgttaggacaaggccacaggcaaggtaaccaactatctggagacattgtcagtactagagtcttgtaatgttctgcattgaggagccatcatactgcgacgccataaacgtggcccgtgtcagtgccaaaggtcgtgacgaggcccacaatgacacaaaacatgtatgagatggcccaccatgagtagttgggatattgggtttgcacgtcggcgatgatagatgagatgaaagcaatgagccatgccagctagaattgtatgttagtctatgtcgagtcatggaggagtaagtcgaacgaacaatcgaaatcgagatggtcatgagcgcgaatggatcgcctagtatgttgctaggccggaatttcgccatgttggatttgcggattgggttaggctgtggaatggaattggtatgaaataatcgaagaaaaagagggaatggcgatgggtgatgagcgatgcgcttgtatataagagttgttgattgccgggtcctgaacgaggcggacgggaaggagtgactgcggttagttagtgtgggaacgacaggtgtgactgcatgtggcaatgaaatagagcgatataaaagaaagacatagaaagataataggattacagtacctaaaaccggagtgggttcagagacaatccgtggggatggtaagaggttgggagtcaaaagaaaagaatctccttgcagagagaaaaagacagcaccaggctggaaaaagaaacaagagacagaatcaatcaataaaaagaaaagaataaaagagtggataagattgacagtttgaaagagaggaggagagagagggaaagataaaaaggaggaaaagtggcagatacgcagtggagtccgggccccctggaaatcgacggtctcgattctctttggaaattaaggaaatttcaatggaaattgcttggacttgatcggtttgagaatagaataaataattggagaatgattctaactgtttacattagtctatttacttttcctcattctctaaacataaacaatgaaaatgaactcgatctggaaatctataaatatccggttagtcacctccgctttgtgtcttaggtaggtacctgaggtagtattccataggccatattatgagaggcgatcttcttgataccttaaatcggccaaaataccatcaattcgggcctatggcgcagcggtatgttactaccacttcaaaggtgtccaattcaattactaatgatcatccaggtagcgcgtgagattccagacctcaaggtcatccgttcaaatcgggttgggctcaactttcttttctttttttctttttttggtttggtgggtttgaagccaaaaaaaaaaagagaaaaacaccaaaaactccccagccttggataaggctatattgtaggacatataataggtatgctaacctaagtgtgtcgtcgccttggtacggaggtcttgcgggttacgaagccctagtggccggtacctaggtagcttcgatagtacacaacctagttatgtaacgattcgcctagcgttggccagataccttcgaactccttaaaaagaactgaaaacaagtatgtgaagattgcagggacagaattaactatctcggcgccgcgcttagacatctctgatgtacagggcacatagagacgaccttggaagctaaaagggctgagtcacacattttgccgggctctttatacctctatgaacaagttgctgtttaccggatatgtacatatatgatttctgcatgtaatggtgccaagcccaccaccacctctgacaatagggtagatggtggtgagcttggcacaagtatacttagtactctaacactagtggcctattcatgttagctgacgcactaccattggatatcattcctagagagctccatcctaatcctgacaagttagtagtcaatataccgctttctacaaccgagcacagtttgcgggggaagaaactggggcaggttagcgcattctagttgactttgaacgtcccaaggaatccatccggatgaaatgacgttgagaggaatgtactgcaaacacctaattgttacaggaggggcctagcctgggacatagctttgtatatgccatgctagactgtataaacttcgcagcttgacttgactgagctggagactatattcccctcagacgtaaacccgaataccaagatatatacgtatgtacatacatacgtatgttaaacttatgtactccgtaggaatatcccatgtgcttattcgagataagaaaaaaccgcgcccaaatcagaggtatcataacaaaaaagcagacaacagcaacagccagagacatcacacccctccagttgctccccataatatcatccaaaacagtaccattccgaaagactcccctctaagcttcctccctccccttcctaacaacttcccccctcctaatctctctctccacatcctcaagtctcccctcccactcagcccagcactccccactcccaacaagcccgacgtcataccagcgctgcagcacgcgcgccgtgcgcactcgcagctccgagatctcagctgcctgctcgctctgcgtctgcgcgagccggcctagctgtggctgcaggtcgattagtgctgcggagctctgcgcatccggcacggggaggtcgtttagtgatgtaaggcgcgaggcggtttcagggaaggcagtggcgtaggagaggactattgaggctagggtttgggttgtgaggccttcggggatttcgtggggtggtgttgtttggaagaggtcggggtttcggtcgtctggtaggatttgtgttagtgtggaatcggataagatggctcggaggatagtggagagtcgattatgcagatgtcaagaatcagaattcaggtagggagagggtaagaatgagcgggttcgtggcggtggtaatgcgcgtgtaaataacaccatcgctggtcacatacggagttgtagaacatcccgtacggctggtacacttcgactaagccgttctaattctgattctagccgcgctagtcggcgggtgactgtctcgtcgagggatgcgggcttttcgggcgcggtagggacgccggtccagtccgtggcgccggtgaggaggtaggtgaggcggcgtaggcgcgcctcgaggagctcgatggtggccccggccactgcgtcactttcgagggccatggtttgtagagatcagagaccaattggggtaattgcgagattgactgagaaagggtgccaggagcttggtgaggtgcaaacatagcaaaatgtggggacaagcttatcagttagctgtacctggatactacaaagtgtacgtcgtacataacctcaggaggcttttatgcaaggatcggtctgctataatatgggattcttcttgtaagatcgatgcttaggatttgggtgtccaataccgtctgaccaattgacatatagccgaagcttgacattgctctacagtatctacatattcatcattcactcattattcataggcttccccgcatgcttcattcaatgctacttcgcatgccctagatgatgcgccatttcttcgtcagcactgttccaccctgagtctgtctgtgggccaataggcgccgtggagtgagttgcggcggcatgatgacccaggagactcgctccaggtttctcctgcatctcttggctggattttggctcgtcatcgaacccggagacttcatagtcaaagacattcacctttgttgccttctctgacatatcaggctgttgtcctttgtgttgagtttccgcattgttcgcctccgccccggaatcttcctggtcactgaagattatggtcggggtattcccaaattcgtccccaaaagcatcgttgtctctgttcacgaagccctgctttcagttagccgaaaactctagaactatctgaggaagactgtgagtctcacctgaagctgtgacggcgcaggatccacttgtgcattcacagcattctcgcttgcatagacaagtaagacagagctccactcttcacgcgcggcttggaggacttcattctcttgaacttttcgaacagtgtagcccacaacctcgccatcctgtgtggctgcagtgttgccttgggttttttgtttttcggcttgtcgggcttttccatcttccgccgaaaagctgatacgccaccactggtagtcattgcttttttcagtttccgagtccatatccatcaggtgccctggggcagttgttttcggatttgataaaacgtaagtcacatgtggttcggtgcatacgcctcgtagcgtatacttgtagacagggggctcaaaaggtgacttgggaggttcggtaagtgtctttgatatctcacggagagacttcatggcactctgcttcctaagttcgagttctgcgctcgggttattagccaacagcatgggtatggtagtaatggctgtctttacctttgagcttggcttctatgtttgtcgaaattgctctcaattcttctgcgactcgcgttgtctctgcatctgccgctccagagctggactgatcaggctcgctcatttgccccggcgcaaccactgccaccgactgggcagcttgttcgaggagttccgtgatcgtcgagctccccacggggtcccgtggcatggtgtagcgatgaatgagttgttcgagtctcaatacatctccctgtatctgctgtcgttttgcacgaaattcacgagcaagatctcggcagctgctaagataccgatctggataaaacacagaatgaatatccacgcccacaggttttggcttttgaagagcatcgagtctaacgactagcacctctgctaaatgttcaagccatgcgtcatcgagctccttccctggtctgtcaccccataaagcagaatccaaaacgtcatagagtgtctggtcattgtcctgctcaacaggaggctcaaaagtgaagagttccctgctatcaggctcagaaaactcgtggaaaggttctttcctgtatgcatgtgatgtgaatatggttgccagtggattttcaggatctgccttaatggctgcaccatgccatgcttccaaaaacctggtgacgacctcctccgaatctgctgataaggatgacatgctgttgatctttgccaagctgccgctgctgccaaaagcacgtttcgttgtatccataaaagccatcagccgctgggtttcgtgaatgatatcatcccagtcgtcatccccggtcttgccatcattcaccgtaacgatctttggcaggttaatcggttgcccattccaccactgcgggtcatggccgtagtcaaatagcggtttgttccgcaggagcaaagcttctcgtgcgaggggaatactatggagaattgtcaaaagccctccgaggtaaatgccctcagggttggggcggatgaacgcaggctcgccctccgctcttttgcggtcttccggatctgggctaatcatgacttcttcggaagatgtgttgaacaaggtcatcgcccaagcaccttcttcgtagtggtctcgagttgctttgctgaactgcggctgtttctgcaatgtcaccccggtttcctgctgtcccatctccgaattcaatgacatagcaacggcttgctgtaattccttttcttcccgttccgccagactaaggccttgtccagaaccttctacattgtcaaatcgcaaatcagtatgcctcttgcagtcgaaatgtcaagatcataatacctttcggagcggtcccaatggaatcttgatatccagtattttgtcctgggccgcgtatgtccgttcgggaaggaggacgagagggcggtgctgtcgctggaattggtggcgcattgtcctgttgggcaaagtcccatgctggggcggggtatgttaattgcaaaaccgaactcggataagtaggtaatcttacaagagcttctgttatcattccagtaggtaggtatcggctttgagatgttagatcatagccgggagttgctgcgcgtcaccaaatttaccttgagctgagaccccgtcggatcctcgaagtacgcgttgatcgctttctgtgagtcgaggttgtttgcctgtaggagatgatttaggggagaaaatatttatcaaccaggtgcagcttcctaccttcaggaagtcgatggcttgctcgcgcgtcgtgcttgtgaagccgacgaagtcggcgatagcttcctcggtcggttcggaggccatgtttggttctgcgctggaactgaaaatcaatggatcaatgtacaagcatgacaagagatacaaaaagcaaatagaacaaagcaaatgaaggcagaagagttgggagaagaggaagaaaagacgaaagacaaagtgtcgcaacggagcttccccaccacatgacgccaagcgtcattccgctatttgcgtctctttgtacttctgcttctcctggtccgattcttcacttctttgagcctaaaatacacggccattctcccatttctttcagctctcagttccaagtttatctagtttcatgtgtgggactagtccacgttcacaatggatacacattgtctctctttcgggtgcttgaatggcctactccgggtctttataccacaatactatttatggttgaaacaaagcagtgtctaatagtacaatagcactcgggttggaatgagagcccaggcgagcgagtataaagacccttcttttccgcgccagattatcaaccatcacacattcgaaacaacacatcatccagcgtccagcatttcaattccacctttacaagccttcataaattgtcttattatatagtcacaatggctgcaacccacagcaaagcaaacaacacgactagcacagtcaataccggcaggaccgccaacaaggtccagaaggccaagaagaccatcaccaagaagaccactgacaaggtccagaaggccaagaagaccatcaccaagaagaccactgacgaggtccagaaggccaagaagaccatcaccaagaagaccactgacgaggtccagcaggccaggaagaccatcaccaagaccactactaacaaggtccagaaggccaggaagaccatcaccaagaccactactaacaaggtccagaaggccaggaagaccatcaccaagaccactaacaaggtccagaaggccaagaagaccatcaccaagaagaccaccgagaggaaggccggcggaaagactcccttttctcctgtcgacctggagaagcttttcccaccctggggctctgaagacgctctgaaccagacggcgaacaaggaagctactgatatcacccaagccgtgtactatgatatcaacgcccactgcaatctcgagagacttgcgaaagagaaagcttccggtagtgaagagaccttttccaacatgcttgtcttcgcaggaggatttgtggagcgggagatcggctactacatgtcccatgtgaaatccttgaaggcggagcatggtgagttccaacccgtcacacctaacagtaggttcttcgagtttgttactgggctcggatggaagatgtttgctatctgttcccatagtgaagcattccgatgcagcatcaaaagagccagcgacagaacctgggggttcctgctccagaagattcaagagaacttcgtgagtattgaactttttgcgcatagccgtgccctgaagtggcgtgacattctctatgcccacaaggactaccccatcccagggcttccagatatgaaatccgatatcaagacatacatgaggtggaaagtcgaccacccccaccacacggttatcacgcttgatggtaagctgaaggagcccatctataacggcaagttgcagaaacacattaacgagagtatctatgatcccaagaagtggggcggcaatgaacaggacccgacgcttcgccatacacccaatggcagtcccaccaaggtcggaagtgcttgctgtatatgtggcagcactgtttcttgtgattgccgcttgccaactagcgcaggagagctggttgaactgcgagaataccccgatacgggtactggtgttcgagcgctgtcgagattcaagcatggtgaaactctcgatatattcatgggtgagctccttcccagtcccgtagaggatgtctatcccctggatcaagacgatgataaaactggacccaataagcgcactttgtgtacgatttgcccccacgagtttggcaactggacccgctacattagccactcgtgccagccctcgacgcagttcaaaactcgcaccgttggaaaccgagttatttgcacagttgatgtcattcgtgacattcttccctttgaagagattactgttaactatggttttaactactggggaaataaagactttgactgtctatgcgggcactgtgatggttctgggccctaactaggaataggccaatcctctcataggttatgcattttgaatttcggagttgactgattttgatagcaaagaatgaatatagatctagcagtgttttcttttctttttcctttttcttttcattgttctaatatgttgtacatcccaaggccaatgtagatttagttcctcgggatccccgcacgtctaaaagtgcggggaaagctatgccgcggacctactccgcctttgcactcttgaatccctttccaactccccttatgattaattgctacatattgtagtacccttttcggtcgatacagccaattgcagccatcagagtcatgagaccttggtcaagctagcattggaataagaacatgagctacagcggaattgtaaccgggcttggcctaagaggtcgtgtatcctgtcgaagatctgcgttcggaggaaagagaatccttcagcaaccatccttggttaagagggggctactgacagagagctatgcacgggggccatcaggtgtgagtatccgctgtccaagaacaatggcgtgcagtatgtctctgacagtagtactttcaatatagccgcccttgatcgagtccacagttggcgaacacttcgccaagattgtcgcggaatgcggagatagaacagcgtgagaaccgtgtcgcaagattggacaattgagacttgagatactaactatactgtcaagggttgtctcaagacatcagaatgatcgggcaacctatgcatccttggacacaagaagcaattctctcgctcgggggctggagtcacttggtgttgggaagggtgagcgggttggagtcatgcttgggaactcgatggaatacgctgtggtatgttgggtgaccgcggaaatgggtaggaagaaaagagcgaggctaatatccgtgacaaggcaacatacgcgttattcaaacttggtgccgttttggtaggtcagctctctcattgccacgggatcattgggtctaataatccaataggttccgctcaacccgtcattcaatactgcacaagtgattgcggccctgggtcacctggaagccagtcatctcctaatcagcacagagtccaatctgccacgaaagaagccacgcagcaatgtccctttactcaatgaccttgttgaagacctccacaagtcgaagttggagtccgcacctgtcccgtctctgagaaatatcattatggtcgacaactccgaaggccgcgtggatatatcgtcctataagagcttgacgcagtatgcatctattatgtcccagcttactgtagacggcagcccgcttcctcctcgaaacctttcgccggatgaaactgtgaatatccagttcacctcaggaaccacatcaatgcccaaggctgcatgcctcacccatcgctccattctgaataatggctctcagattggtgaccgcatgcttctcacgccgaatgatattatctgttgcccaccgccgttgtttcattgcttcggcagtatattaggctatatggcgacagcgacccacggctcagccatcgtcttccccagtgaatccttcaatgctcgtgctgcgttggaggctgtccaagaagagaaatgtaccgcgctatatggtgtaccgacaatgtttctcgaggagttaagcttgatcgagacaggagaagtctccagcgagggattccaacatcttcgcacgggcatcgctgccggaagcagtattcctgccgagataatgaaaaagctgcataaggtactgaatttgaccgaattgactatttgttatggaatgacggaaacaagtcccgtctcggctatgacaacgactgatgatcccattgataagcggatctactctgtcggaaagctcatgccacatgtcgaggcaaagattgtgaatccggtggacaagaacgtaattctacccatagagagacggggtgagttggcagtcagcgggtacctgctgatgaaggaatactgggccgatccagaaaagacagcggaagtgatgattccggatgattctggcaaagtgtggatgcatgtgagttcaattttctatttgttgtctcgagtaaagctgtttcctctgaccccggggttttagactggagatgaagcttccatgtcaccagatggatatatcactatcaccggacggatcaaagatctgataatccgtggtggcgagaacatacaccccctggagattgagaattgcttgttagccaacaatggcgttgcagacgtgtcggtcgtcggcgtccctgacgtgagatatggcgaggcagtagctgctttcattgttcctcgggaccacagctcaaatacagtcactgctgaggagatccagcaatgggtgcgtgaaaagctcagcaaccatcttagtaagtcgtatcctaggcaactgctttacgtcgtttttgaactatcctgacaattgtcgcgggggctgagctgatgttttgtctgtttacagttccgaagcatgtcttctttttgggccctttggagtctttccccaagacagcaagcgggaaaattcagaagttcaagctcagagagacggccattgcacttttgaccaagtgcgctgcatgaatagccagcataaaggacaaggcctgacttttacgtggattttaggttgatgagtgctttgtacatagttatgtagtgctgtatatactgagttacaagtagtggaaagacctaaagtacatgtacttgagggtgacatccgtcatccgtcaccctcaagaaaaaaaaaattcaaactcgaggactcgaagagtcaaggagttgatgagtgtggtttcaaaaattcccaagcatgcgctaaggcttgcttgaagcggtcaggttggtagttttcaactagcaaaaacacgatctcggatttctcctcactgatacgtgtaaagcacctgcactaggatggagaaagaaagaaagaagaagaggaagttcagggggcaggaccaggtatttataattttccagtggcttaaggctgcgacaaagaaagggtaggcaacgacaaacgacaaacgcattcgccctgacaacctgcacctgggcacttgcacgcgctttgataatcgctgattcagggtccgggggggccggccttataaagagggctaggggaactacgacagtagacaaatccacaatgtagtacttagaacttgaaaggtaccaaagacataagaatggaaagactctggtattttcctacgaataaccttggaacgtccctgatatcatctgacaaatacatcagatcacccgtggacctaggtactcaaatcccacaaggtctgttgtcaagcatagaggccgtagcggccgacgcttgttgtcgagtaaagagtgatcgcgtggaccagctatggaattcgaccaatcgtatattgtccaacccggaacgtctcatagaactgaggctttcaacaatggtgtgagtgcgagtgcgaatgcgagcacctgctgtctctcgggatagcagcccgtggcaaccagcggccatcgcagacaatattagatcgtgccgccacatccacatcacaacgacgaacagagacccgtagatggggcagaagactcgaaagcagggccaagtccctctttttggccgtccgagggtggggtacttcagaggtagtcgacagaccactggcaatattgtatagcatcacgtgtagccagcgagcagacttcgctgtaacccacaggtcaaagacactgcaacaagtttttttttcctaaatctagaaatcttgaatgcctgtttcaccctgcagatttgggcgagcgtcgtccccgcgagtgctgtcaaccacccattcaggctcctcatcctcaaaatactggtcttgctcatccgtgtgatcgtcgaggtcgtcattttcatcaaccgtcttgtaatcgaaatcaatgtcgttgccctgcatgaaacgcaatcccatctcccaccgccagagccgctcgccttcttccttatttggaggtatttcatcacggtcctcggcgaggatctccccatctgggccgcgggtgtagctcatcatagcgttagggtctgggtttgcgatcgcatcaatcttggcctcggaccgtagaaggtcggtctctaagacacctgagaaccccttcgctcgcccctcggcctctctttcttgtgctgtctggaatcggcggatgaggcgatcgtatagtaacgggtctgtggagagtcgagcaggattagcattgtgtttctcttttgttcgcttctgtatgtaaatccagctggcaccagcgataaagcaggccgagcaatgtataaaataatcaactggcaatgggagagaagagagcaggcggaccggctagctcaagccccgctgagaagtattctgggtgtaagtccagataccgcttgcgacggtttttgactttgacagcgttctgcgcgctggatgcatctttgactgaaaacccggaatccttggggaaatgtggcatcttcggtgtgtttcagagtgtggaggtggagaggagaaggaagttgggaacgcggagctcggcggcaaaagttgccttcttctccgcaataacttttttctcgttgaagattattttgatatgtgtctgttctgaacgtgtaagtcggggatctgatttcaaacacatctttattattcattggatgtcaactgcaataagggggaaaaggacacagtttcaggttgctaacaagcttgcagatgcgctatcttggttgattatttttatatcaagaactgcgtcagctgagaatcatgtctctccaggacatgttgcagcacattgatgcccggcggctcactaccggcgtggttttgctgatcctgcttgccttctactcgcccctttcgaagcttgtcttgtctccaacatatggatcctacgcagcgcatatcttccatagttttggagtggccatctccggcggagtcggatggctactgaaagataagattctcaagcgtctaggtcgtctcggtggtttcatgctccctgtgttggcattctgggttccgacactccaatacttcatcaagcagcaaagctccaagattggcaaccccataggcccggtggtcacggaactctgcggttactatcctctagtgctgttgaccgtagcctatgccggaaagcaaatccagactgctttgagacttgaagcacagggtgacctgattgttgagcatgtgcccttgatcggtacatatgtgttctattcggctggcgagcacatcgcccattttgttctttcatggattgttggaacctcggttttcttcaccagagtgggcatgcaaatgcttctcgctgcctgttactctgcactcattccgtcaaaatggctggtcctggccatcccctctataattttctcagtgacctcgaacgtccatttcgctggaatcagtggtgtcaattctgcaattgagcacgaaggttactctctcttggcacgacaggaagcttacactggatacatctctgttttggaaaacgagaatgacgggttccgcgttatgcgttgcgatcacagtctgctcggtggacagtggaccaagctggcaccaggctaccggcctgaggtggaagatcctatctatgcaatttttgccatgctcgaggctgtccgtctggttgagccggatcatggcgttccccgcgttgacgcagacagcaaggcgctggtcatgtaagaatcattcaaaacgcatcactcgcccggtttactgacaggaaacagtggtcttggaattggcacaacaccctctgcgctcatcaaacatggcattgaaactaccatcgtggagatcgatcctgtggtgcacaagttcgccactcagtatttcaaccttccgccaaaccacatccccgtcattgaagacgccgtaaaattcgtcaagaaagcagagtcctcccccaataaaccccagtacgactacatcgtccatgacgtattcaccggaggcgccgagcccgctgaactcttcacatacgagttcctctcaggcctctccgcgctcctcaaggaagacggtgccattgccattgtgagtcgcaccaatcaacaatccaagttaaccacatactaacgaataaacgccagaactacgccggtgacttgaccctctacccaaccggccttatcgtccgcaccatcacggccgtcttcccatcttgccgcatcttccgtgaagcgccatccggagaggacgaagataccgacttcaccaacatggttctgttctgcaagaagagctccaacaccccggttcaattccgtgaccctgtcccggcggacttcctgcgcagcaggtctcgtgaaagctatcttgttccaaagcacgaacttgacactgccatgttttccacttggcccaagggtggcagatctcttctgtgggcgaaggaggttggaagattgcacaagttccaggatcgcagtgctctcaagcattgggctattatgcggaaggttctgccggatgctgtatgggagaactggtaagtgttgaaaggaagtcgagcaaaatttgagatcggattactcttgatctcggttttatatttgctagctatgtcagaggattgtacaggaaaagtggttaccaaataatagtaaaatagactacgggaaaaaaaaaatcttagttctactaggaagcattctggcgctgtgttttaacagttataactccaacaaagagcgaatctactccgtacttgtctcgtcctccgtgttgctgggaagacatgtagactaacaatcacagacttcataactattggtatcattatctaacacctgccgaaaagccacgggacctccatccactgctagaataacagagcgactgcctccccttcacagtcaaaggcctccctccccatagccctttcatctccatatatcaaaccacctggcccagcgccaggggcgagtcccggcctctgtattatgtacgcacaaagaactaaaatacagtgagaaaagaatgaatcaagccgaggggcttccacggggactggacccaggcttcttgacgaggccagcgaagaagttcgccagggcttggttgtgcgctttctcatcattgccgccggtgcctgcatacgggctctctttcttcatggttcggctagcctcgcggtcctggggtaatatttagctatatcctgggttggggagggtgatgacgccgtgctggccgggtgcttacccgaagctttttcaacatatcatcggcgtccacttggattccgcccatgttgaactgtacagggccgatgtgatcgttgactttgccttcgtcggccatgggagacatctccagttggggggttggctggtttgcattctccttctcatccttggctttgagttcttccagtttctccacttgggttgcgaagaagtcctggaggtcggtggtctcgatttcgatcttggtcgtgttgccgtgagggttggctatgcctcgtttgggatcggtgatcgtctgttcgaacatcgtcaccgcacttgtaccttcttctgctagaccgttctcgctttgcgggttgtcgtctgcggattgatagattgactcgggagggtcctggatctcaattgaccacgctgtcgacactccctccatgtcaaatccttcccgaataatccggatcttaccccatgagtcccagttggctggcaccagaatcttgtctcggtcgatcacattatgttttaatgattctcttttcaatagagagtgtatgcccagagaagaatggatcaggccctgaagagagtttgcaaggaatggggtagtatagatgagcgatgcgccgtctgtcaggcggttagaaaaaagcccagaatagcgagacacagggtaataaagtccttacgcttcaggagaatagttctgaggaactggagaacgaaatcaaactgctcttcatgccatccgtggtccttctccagtttctcgatcttatccgcctgagaaagtcaagtcagcaaagcttcaccagcaattgatttctggaggatagtttacgtaccccttggcagacaacacacattgggattccgaggccttcatcccattcaccaggtcctaaaggtattgtaactggaccgcttgagtttgatatgccgcctgcagctgcagagctgggatcaattccccttttacgatcgcgccactccgtcatggtctcttccataacgaatttggtttcatcgtcaagcgaaacaagcacagaacgtagcagacgcgtccattcccttagccttcgaacccacgtccatgggtctgaccagtccatcaggatgacaaccagcgtttccgggacggacttaggggtcaggagtggtttgaggagaggcgcgaatgacggagacggctcggacaggaggtaggccgaaacgcgggccagagtatctgcacgagaagagcattagcatagctgaaactagtaaagagtgcatttcccatgtaccttctttatccgcatcgaggacatctcgatatgtgtatccaagcgcaaactgattggcgattggcggtgttttccctttacctttccgcttatcgtttgctaagctagggtctgcagacgtgtccgcggaaaaagtatctagaaattccctttggctgtccggcgtgccacctatcatcgagctattagcgacatgtccaagaatcgaagggcaataaggacgggcgggactgagatgctcggaggaaacaggtactaacctagcactagcaagttcttctcaggcaagcgcttgccgttggcaacagtatctaatagagaggaccaaatgttcttcttggagccatctttgctggttggccgactgctcgttccggccgctttcgacccgggattcggactggaggacatcgtgtctagtcccaccatgcctcaaagggcattcacccttccaaaatgtttgtctctaccgtagcacagcggaaatattgtgcgcgtggaaatgtggaggcggagggggagaaaggcgaagcagcgtcgcgggtcaggggaatcccgaggaagatggataaatgaaggcccagttgaaaacaaccctacttgcgaaagggtcttcgattacaactcacgaagaaaagaagagtggaaggtctttttctggcacatcgagcagggggctagtttgcattataaaggtgcgtctccgtaaacaattgattattacggttccgcgcgggctccacatttctttctctccaacttctgccacatcttggaactgctctctctcacacacttcccccaatgaattccattcgccaggtccaggcgctcaataagcgtgagcttgagcatgcgatgtaagtcgagctcatgtgaagtgcccaaaagctcttttcccccgctgacagtgttaccttttatagacccccagaggcatcatggcacgcagactaccgcgacacagcctatatctacatcggaggacttccatttgatctatccgaaggtgacattatcacgatattctcacagtatggagaaccggtgcatgtcaatctagtccgtgacaaggaaacaggcaagagcaagggatttgcctttctgaaatatgaggaccagcgcagcacagatcttgctgtggataacctcggtggtgcaactgtcatgggccgtttgcttcgagtagatcatgcgcgctacaagcggaaggatgacgaagaagagcaggacaatgttgccaggttgatgggggatccggttatcagcgaggacaagaaggacaaggatgacgaccggagaaggagagccgaaatagaagacaggcggccgatgctgaaggaagagaaggagctggaagaattgattcggaaccatgatgaggaagacccgatgaaagaattcctcatcgaggagaagaaagaagaagtcgctactgcaatccagttgtggaacagcaccaagaagtcgtctcgccgacgcgacgacagcagagagcggtcaagccgccaccaccggcgacaccgctcccgttctcctcgcgagcggagacatcgagacgatcgttctccagataggcaccgacgatctcgccataggtcatccgaaagaggggagaaatctagaagggaccggtcaccgaggaaatcgcgctcgcccgagtcccgaagacaccgaagtgatcgggataggcatgatcgccgccattgaaagatatatgagatatgataaagtcttctaaggttatctacggtgctacccatatttcttgccgagattctctcattgtgacctgcgtcaccctggcaaatcaaaagtttcccagtccagcaagtgatgcaatccctgcttggtgctggtgatgagctgtgctgcggacaaggtgttcgttattttgctgtgcgatatactacccttgttatgacagactggggaatctctgtcaaccgagatatctcttccagccatcccgcacacaatatctcttgccttcctcgccatctcgaatcacgaatttctcccagcgcccttcttttccggatccgattaccaacagagtgtggtcatcgcaccagcctatgaggcctttctggggccgaccatatggtgacccgatcggtggcacatgtggtgatcccaggttggcttgctcgccaatctcaaaatgtgcgttggcaaatgaataaacatcagagaagacacggggaagcaggggaattttgccaaggatcccccatttgtggctagatgtttcctcggatgccggtgatggcgactgactgcgacgagcgggttgttggtgggggatatcgaagatgtggagggtcgatttgtcagatgttactgccagtaaagtattggacggcgaaaaggaaattgagaatatcactgcgtggtcaacaccacggcgcaattctgccagtttcgtgcaatttcccgtagcgaatatacgaaccagagtcccctatataggcgtcaataatctacccctagataattgcagtgtaagagtactcacggcctcgctcgcagtcgccagcaagtttccatcgggacttagggccatagcccgcaacggggtgctatgtgcgggtataatactgatgttgccggtctccagctctatcatttggacctggcccggagaccggcctgggaaggccagcaacttgttatcgagacaggccagccccaaagggttgtcggaggtctcaaagaccgagagtttctggggagggttggagaatgcaaagacatggacactgttcaataaaacagcgacaatttttgatttggagagacgaacaccgaggacggaggtgcggaattcaagtgtgatggccgctttctgtttggcatcgtcccatataaccaactaagggtgtctgtgagtttgacatactcgcaaattgtgctggtaataatttcttaccttgttctgtggaaacttggggttcttaccacccccgacaatggccaagtagttcgactggccaagcatttccgccaccccaatgcctgcattgaaatcttaagtgcgaataagacagtcagggtaagttcttcaatatatttggacattatcaacttgacaataactcgcttacctcttaagaccttgagctcacaagggttggcattatatactgttcgggtcgttcatcagcctgagctccatagttcacgatataagctagcttcgtccaaggttctcctgacagctaagcaagcattccttaccacaaaatcccgtgtccaagcccactgagaagcagctgttatcatggttaaatgttgcagagagtgaatatggcccggtggactcatcgatagattggcgggtattcattgctgtatgttaacgaagcatgggaaaggatatgttggccaaatagatagatgtgggtagactctgtataagtagccccctgcccttaatagatattgaattaatgatctttttcaggttataatgcttcaaatgccttcacaggatgtctgggaatccccgagcttccttaatcgataagagcaatgcgggcaagatccacttcgacacctcaggcggtgaattaggtaatcatacggttgccagcgacgacccactttgctcaacccctgagttgatgttcgatgttggtggatgggaatgaaggcaatattgtacatggagaatatgaggaatacccgtataattgacaatatactacatttcccctttttcccctacatccagtaatccattgggacagatcaagagctttgtagaagtaaagtaacagactggagaagaagagctgtcccgtgattggccgcccatttgggaaagggggaaacacgaactgtctttcctccccccccctactctctccagactctcaggagagccaagtttcacacccttcttcttttattaattcctttggtcttccttttcttacatttctttaattttttaactcacaatgtcgtcagccctcaacgcggtatgtacatattttattgggagcttccttcctaaaaagtttcccaagctaattgcatgcccgtactcgttccgggtagatcaagattcgtcgcaagaagaatgtcaagaagggaatccaattctgtttgatggtgtgcggcgccagtggaacaggtatgtttcgaaacgaattacacaacttccggggactaatcgggtctcctttccacaggccgcacaacattcgtcaacactctctgcggcaagcaggttctggagggcaaggatgccgatgatgctgccaatgctcaccttgaggagggtgtccgtatcaagcccgtgactgtcggtcagttgaaatcgtcccccgcgcacggcgcttatctcaagctatcaatactgacaccgggatggcagagctcgagttggatgaggaaggaacccgcatctccctgaccatcgtcgatacccccggatttggtgaccagattgacaacgaggccaggcacgtacacacagttacccgacagatgttcatggactgacttttcggatagcttcggcgagattgtcggttaccttgagcgccaatacgatgatattcttgcagaggagtcgcgaattaagcgtaaccctcgattcagggataaccgagtgcatgtgctgctctacttcatcacacccaccggccacggtctacgtgaactcgatatcgaattgatgaagcgcctctctccccgagttaacgtcattcctgtcattggaaaggccgactcactcacccccgccgaattggccgagtccaagaagctgatcatggaggacattgaacactaccgcattcccgtctacaacttcccctacgacatcgaggaggatgatgaggacactgtggaggagaacgctgagctccgtggactgatgccctttgctatcgtcggttcggaagactttgttgagattgacaaccggaaagtgcgcgcgcgccagtacccatggggtgtcgtcgaggttgagaaccctcgtcactcggacttcttggctatccgtagcgctttgctccacagccacttggctgacctgaaggagatcactcacgacttcctctatgagaactaccgtactgagaagctcagcaagagcgttgatggtggttctgggtacgtttctcctggtgctagaaatttctgtgatcaatctgctaacgcatggagcagccctagctatgattctgctatgaaccccgaggatcttgccaaccagtccgtccgtctcaaggaggagcagctccgccgcgaggaggagaagctccgtgagattgaaatcaaggtacagcgtgagattgctgagaagcgacaggagctgttggctcgcgagagccagctccgagagatcgaggctcgcatgcagcgcgagcagcaaacccaggaaggagccaacggagaggcctagatataccctgtcgacgatacagctcattcagcggggcgccagttcgcaatgtgataccgtttgtgccagcatggactttttatggcactaacaagtcggcttttgtttatgggataatattgactgtttattcacgttaatagctttttttttcttctcttcttacctctgcggggatgggccacctcaacatagattacagcactccggtcacgaattgtgggtgcaatgcttctcatttccaatgggagactgaactatgtcgagttgggaattgtttttactggtttccggatccccggcctcgatacatctcgctcgcgttccccttctagcacatgttttccgccgtgtccaggtcctcctgtcttctttttccctttccatcacatctcagctaccaccgtcaaatgttgctgtgtcatttctatttcctcatctcctctgcttcctctcctgttcttgtccaaagtccgcagcgcagcaatattccctcttctcttgttttcgtttttgcgttcgtggctcctgtcttgttcattatctatcctttctcctcgcctgtcttcctagcccgatagtaattgaggacgaaaaagtactcgactagctcgctcgcttctgccattttttctagttctggtaacgtagttggttaccgtgtactatctgcaccaaccttcttgatttgcggagatcaaagtattcatgaatatacctagcttgaacatattagttatgttgggcttgctcgaccttgtgtttagggaacgaagaggtccaagtctagggcttcgccagcaaggacgattacatgccgttcaattcacacttccttgtttattgggttaaaattcgtacgtatactcgctaggtatatatttctagttgcatatggaccaatcatccagctatgaacgaacatgaagagatatagtattgagacaatatattgttgctccatgccatgttatatattctgcttgtatgaaggaatgtaaaaacaccatgagagaacatcgagtatccacattaactaagcttgagtctactgcaatctcatctgaaatgcaacggtgccattcacatcaatggaaattgttaagtataacaaagatgcctcgaactcaaaacgatacaggtagaacgaagacgtttcgagaatatggtcatgtggaaggagacagagccggagatagaaggagtaaacaaaggtaaaagttttttaaaaaagaagagaaaagggagcaaatgctgtccgcaagaagttaaaaaaagaaagagaaacgcagccaaaagcaagaaagcagacacgcaagaagtggtatttgcgctccattgtacattgcgtagaaaagacgggaagaacccccgatttgttgtaattggtgtcgaggaaagggagggattggtgattgccaagtagatgtggatggttggctgaactgttgtagagacaacatagtacatacatccacgactttgcgagcgtggtgggatgacacatccagtgaaggattaatctcatggagaattttaggaaaagaagtccctaatgttccccgggaagagagaagcgggtgacagcgccaaagcggcgacgtcaagcaggtttcgttgtggcatgcacccgcgtcggacattatacagcagctggctgcggcttattggtccagaaatctaaactggcaacagtgtcatagccccggtcatcttcataggcatagataatctacgaaacccagttagcgtttgatcagtgatagaatcaccccagagaaacctccgagaagagaaaacctggaatagcttacctcgcgcgtggaactgtgcaacatgcgaatgttcttgccggtcataaggtgcgtcaattcgcttgtttcaacgtgtcgaatttcaacaaaattgggttcgaatgccaggatataaggataggacagcgcgaatgagttggggttgccctcccaggcgatcctccagtccggacgggctcgccacccgttgcggttgacgaagaatgagaaatcactatagttgagtaggaactcgccgttcatacgctcaatatgaatgggtttcacattctcctttcgtgccacgaaatcaagagacgtgtcggcctggtcaaggagagactgcgtctccgttgtttctagactgaccacttcaaagccacgtgcacaaccaacgcacagagtagaacgcaggaagtgaatggaagaagactcggcagggatatagtattcctgggtgaaagtgttagcatgaattgaactacaaatatgcaacagagaatacgaaccttgaatggcttgagggtatcctggccgccctggaacattttgctgacagcggacttcttctttccctttgccagattgtccatcggctcgtagaccttgattgtacttgatagtgctgatgttttgactgaacaaacaagatggcgaccgagaccaatgcctgctttgaaaaagttggcatgtccttgaattttcttgggccgctttgccatgctgttttggccctcaacgtaatcaagagcgtccataggataagaagaaagtgttttgtttgctagaaccaacagcagctggtactcttctagagtgtcgatttgcgtgacctgggtagcctctagaacctttcttggtttcgctgttttgtctttgggccagcgttcagagacaaatataccattatcagtcccgtaaactaatttgcgacctccatctggtagcagttagcgagagactcgaggtgaacaagaaattttccacttaccgatcggaacaaggcaattgattcggttgaccgctgcgaagaagccctcgctcaggatcgtcttgttgtagaaattgctgtttcgctcccacagtttctgttgttgttgctctaccgcttcgataaacttccgccgtgtggcggcgcttgtggcataaagagtctgctcataaccacctttgccaagatgtctgaacgtgatcggcagtccgccatctttggcaggagggggattattgatgacagccttattcgacaggagactggatgaaggtcttttggcaatacccagccgtgggataacctcttccatctgcgcgataactaacagttccaaaggaatgggtttcctataaactcgagattcctcccgtttattcaccgttttgacgcgaacgagcaggacggcatgatcgaagagatacgcagtaacatccgagctgtcggctgtggtcttcttgaatgacatcttcatgagcatttgtcgattttcttctgtaagcttcaaatcgacatagtccgcagagttgaacttcagcgcagcgttcagctggaccaagttgaaatggttctccgcttttccactttcggcattgacgcgcgaaaggaagtccttaatcagcttgatggccttcggaatatcttctttgtcggggttgccatccgcactgttcttgtaaacaccttcaagcaaaagcgggtaccttgcaagacgagttgtaggcttcgtcaagtaaccgttcagttccaacttccgagattccttgagacgttccgtgtcttcgacgaatttggcgaaggctgggtttgatgctttttccttttcaaactcgtactttccataaagctggttggcaccatatttgatgaaggggtcgaaattagggacatgttgacagaagatgtcgccaatggtgtgaacgacttgactctccttttgtcgagcattcagggcttcacacagagcgctgttgaccttgaggacctctaagcagttgccaaacacagttcggatgaacttctcacgccggtgttccggaattggggagtgggtggtggttccagcagcgcgcaatggtcgcatccagaaatcccgcaaatattctaagtccttgacgaaatcacgctccgtgtacatgacctcgaagataatctcctgccgtttcttctcgtgatcatcaacagagtccgagatctccttgggcactgtgctaatccacagcttttggttatcattgtcgtcatcgtcatcggggggcagggcagtcttggattccgatgttcccagcaccggctcaggtttcagattcaacctggcttgctgctcgagtcgtcgcggacaagcgatagaatagcagagagtgtcccggttgcaagtgggagaataacattcagtcaggagagtgaacactccattaacctcgattgtcgacttgtcttctcccattgtttccttgaactgatagacctctccgggtgcatctcgaagacggtggtcatatgtgacatcgtggaagaacttctgagcatccagcgcacggccaagcaaaagagcgaggttgcggtcgttggttctgatgatggaggcgatcaagtccaccgagtcagtgcccgagaatgcgttctgataagaaagaccgttcttttgtcgttcgccgagtgaaatcttttccctgaaaacctcagccacaagagaaagcatagcaggatagaccaccggaactttccgttgtgaatccctagaaacaagggtagcttttccggaggagccctgtgtgccctgtgtggcttggctttgaacgctcatcgtccgatcgggcgcaacagtggatgccatagacatagtccgagatctttgcgatgcatcgcttggctgacgagatgcgacgaactcgtcgggaccgggctgcatcattgagtcgtaccttactggaatctgctggtcgtgacttgacggaggtctgcggtatgggatcgaccttccgctgttcatgatatgcggatcccgatccgatgaccaagaagtcatagacatagctcgctcgttcgcatgcttttctgggacaggacgtccgagctgcgtgacctgagtcccagcatgatactgttcacggcgagaggcagtggcagaggtgtggttgaagttgcttggcggggtctggtaaggtggcccgcttagtttcgccattgatcttgaccgggtcgaatcggaattcagcgcaggaggcggcataggacgattgaaatccctaggatctgggtattgcggagcagggcttggtcttgactcgaggcgttgaggtcgagggtaggcagcaaagcgttgttgggtgtttggattgtgtcgaggaagctgatgtgaagacattgtcgccgatgctcctggattgtaggcctgatactgtccagacggtgggggtggaggatatccgtttggtggtgccgatggcggcccatgtccatttggcatttgccgtgttggcggcggcggcggtctctgaaattgggggtgtacgacatgcgatgacatggtatgagcgcgaccctgcgagaactgcggagtctgcgaattcattgtatgagagcgtcctgcgggtggtgcgcctccaaagatatcagaatacgctgcatcccgttgcgtggacgaggcgggtccgtgaggccggtaattccggctacgttgaccccccaaatccgccatttttcacaaattgtcagcgatcccaagacgagtatcggttggtttaatcagatatgcgaggtatatgtatgccggggtgcgaacaaggcgaaaggggtatccgggtcgatcgtggagagcgttcagggcgtcgcaatggtctgttcaagatcgtagacaacgggataaacaatagaggtaaggtgagataaaaaaaaaagccccgcaggcaatggcctcggaagaaataatagattgcctcaaagcactgatgggactcaatattccataactcccctcagttatggggaatctaaaggcaatatcaaagcggtattaatggaaaagcgccaggagccgtgagcgcaactaagtcaaggctcctttcaatttcatgccctcagcatcctccaagatctgaggtgagtagtgaaaaaggtatagttgttgaaggtgggggtggtagttgttgaaaatgcagtaaactggggggggggggagggacccaggagaacgaggatggcgaaggtgacggcgaggccggtatagtaatttcaatacaaagcctcctaatctgcccggtgatatagcgttgagggtcgagatcgggaatacaagaggtacggtatcgtcaccgcccagacaatggcgaggactacggcggccgaagtgaccatgtggaacaccccaaagccccgaatccccaatcaacaggaacttatccctgctcttgatcttgtatcaaacagctctcattttcattcttgtatttctttgcaagtttagacttgctctaacatcaccatggcagacagtgagcttgcgcccaagttcgctccgttcttctccttcgtgagttcaagccccgagaacattgaggttgataaactaacaggcttcctataactaggctggcattgccgctgcagtgagttgattatatcttcgttccgatttaactgtatactaacagttccctatagatgatcttcgggtgtacgtgaaatacctcgcgtggatggagctagctctctaggttctaggtattcggacaacagcttacaatctcacagcggcaggagcagcttatggcacagcaaaatctggcattggaattgcaggtgtgggaacttatagggccgaccttattatgaaggtaagaaacatttacccaggttcactcgtttcgtggacaagacggtagctaactgagttcataactgcagtccctcatccccgttgttatgtccggtatcattgcagtctacggtctcgttatcgccgtgctcattgcgcaagcggtgggcccaacaaccaacatgagcttgtacacgtacgtttcaagaattcggtgggtgtggaacttgacacaagctgacactgcacagaggtttcatgcatcttgccgctggaatgtcagttggtcttacgggtgtggctgctggttatacaatcggagttgtgggtgatgcagtaaggaccctatatgcgcaaggtgaaaggactattgaagccctaacagctactctagggtgttcgagcatacatgcagcagtctcgggtctatgttggaatgattctcatcctgatttttggcgaagttcttgggctttatgggtatgtttctgagtccaggttctttagattactcttactaacggtggatagcttgattgtcggtttgatcctaaactcaaagtcttgagcagcgagtgaattacatgcagcaactcattgagcaacactttctcgtccgctaccggccatcctgagctcgaactacaccatctaatgtgtaccaaagacgtaactaggacagataatggccacgggactggatcgagatatggacctgatgtctgaatcgaatacattcttaagttccagtgtataattaaaagatcttatatagaatcgggtcgaatcaaagctacgagcttagtccggtttatcatcgtagtttcttcccgtttagccccgcccccaatagcaaatacgtcagaggcagaacttacattcttacaactctttgccccgcgattttttctctcaaaccccagattctttcaaaccctcgaacctcaatgttctttatcatctgaaacgtggaatccacctgtgttgccgattggtggcgcgctaacggggtctccatacactttttttttacccttttaccgcgacatgatcttggaccattctaatggcaaccggagcagtgcaacattcgccaaatgaggcgccaggaaccatggtcttctccaagataaatggcaacctgcaccacagggaaaagcaactcgtcgagtccctccgccattctccgcgatcctcgaaccctttcctcatcaccgagcgccaggacgagaagcaactgtgcatttcctcgaggagtctgcatgtgaacgattttgcgctcgtcaagactcttggaaccggtcagcgcgtggcctaacccataatttctcaagtgtcgcatctgacagtttatacttctcatcgtataggcactttcgctcgggtgtggctcgcaaggttaaaagaccaaaaggacaaggacaaagtctatgcgttgaaaattcttcgaaaggcggacggtaagcgccactttgtttagcgttgcgcgtggcgagggataactcgtgctgattgcgactgaaagtgatcaaactcaagcaagtggaacatgtgcgcaacgagcgaaaggccctcgcagcggtggttgaccaccctttcatcaccacattgatcgcatcattctcggatgagaagtgcctctacatgctggtatggcaacttttcttttgcaactcggaatagggatgatcatagggtgctgaccaattgttagctggactattgtcctggaggtgaaatattcacgtatctacgacgccaacgacgctttagcgaagaagtctcgacattctatgcggccgaaataacaatgacaatcgagttcctacacgacgtccacggagtcgcctaccgagatctcaaaccggagaatatcctgttggacgccgacggtcaccttaagcttgttgacttcggctttgcgaagcaagtcgataaccgcgagacgtacacattatgcggcacgccggaatacctagctccagaggtcattcaaaacagcggacatggacttgcagtggactggtgggctcttggaatcttgatttacgaattcttgatcggacagcctcctttctgggatcagaaccctatgcgcatctacgagcagatcatcgaaggccgtctacgcttcccgcccaatatgccggctgcagcacagaacattgtctccttactctgcaaaacaaatccgacggagcgactgggccacatctctggtggctcgactcgagtcaagtcccatcctttctttcaagatgtcatttgggacgatttgttttatcgccgggtgaaagggcctataattccccgcctatcacaccccgcggacacgggtaattttgaagaatacccggatccccccgacctcagaaacacgaacatctacacggaggatctgaagaagaagtacgagccgttattcagtgacttctgaaaggttctttcgccattacagcccatcaagctctcaccggaccttcatttctccggcattctcagatgacggccatcactctctaaccccacgggaacccccacgcacacctccccggtgagcgaatgctcctccacgcaggggccgcacgcctgatcattcgcgatcattagcggtcatccgcgccgatcttagctttctgttttcagatgagatcccatgacagcccctggcatgtatgtctggtgaatcggaggatatcacacacctcgccatgctattcagtcggtgtcgccgccataacttgaccttcccacatatccacacacacgtggacaacagtatggagaccatcccgggcagtattgttttttttaaccccctttttttttacatacactccccttcacacaccttgtgctgatcatggtcgtggacattgattacctggaatccatactcttccccgacctcaacaacctcacaaggtttctaggcgcaatcctgtgtacgggaccgttttaatgccatcttcttttgactctcctttcgtcgtaaagtgataacattacttacatagtcatgggtagtggatcgcgaagttacatagatggctgcttttattattccggattttcaatatcatctactatagcatgtagatattttcatcttggacatatggtcttatagttagcacagatttcgtgtcatatcaagactcattcaatacattgtccacaaccatctcatccctttcacaggccggatgaaaatcggcaacagaaagctagcactcgattagaagatgcatccgggaagagaacagttctagttgggttgtctagataggatggacacattcacataaatctgataatcgcagcgtttattgatagaagctaagaatcacctctttctattgtcatggagaacatctatctccctgttcagagagacttgagtatagcagaaatatatacatagatccttccggtggcaacctgatgtggtgagccttgaggtatgcttcaacctcatcacacctcaccagtctatctagcccgaaggatgggacctgaaactttgacatattatgtacacattcaacccaattggattcttcttagatcgccttgcacaatcggccatcctcactctcggtccactcgtcagacccgacagcggttctggcgtagaagatatcgttgggatcatacttggccttgatctggcgcaaggtatcatagttggcaccatagaagacctgcttgaagttgggctgttggaagtcaccctgtcaaaacagtaagcatgtgtacacaataatgaaaggaattcgagcccactagagctagatatcagtttacatacctcgttcatataagcaccggactggggagaaagcgcagtcagcttaggaatgaaatcctcagtcatttggcgctggcgctccaccatgagagcgtcattatcccactcccatggggtcgtcagagtagtatcgatcagggtgtcgcgccaagcagggaggactgcattgtggacatcaccagacaccttgtgggagacgttcaagccgacaccgatgaaggtgccgcccgcctcggtgatctcacggtaggcggtcagcagggcgtggttgttgttctcaacgaccgatctcgggactagccagcctccatactgggcagtggaaacctggatggcgccctgcatatccttgaactggctgtagtagctgttgtactggttggaaaccatgttgtagttgatgccgagcgtgtcgagcttgtcagtgaagggcttgagaagcgccaccaagtccgcgacagggatgttaggaccggtgatgggggcaatagagaagctggtgttagtgaagtaccaaacgctcatggcacccgcgtcgacgatagcgggcaggttggcgtggaaggtctcgatggaatcgtagaaggtatcttgggagagaccctcatttgtgtaggtcaggttcagaccagagacaggagttccggggtgtgccttcgcggtcaaggaccagacgataccgtaagtgcccgcaccaccaccgctaagagcccagaagagatcggagtattcattgtcgcgggtagcagtgatgaagttgccttggccgtcaatgacctcccatttcaggacttggtcggcggccagaccatagcgggaggcaagtgcggagtgaccacctccttgggtgtagccaccggcaagaccgacgctgggacattcaccgccaacgacctggtagccagtctgttcggcgatctcgtaggcttcgaagccctggattccagctcccatggtaatggcctttccggagtagtgctcatcattgtaggagtcgatggagagatccttcaggtggtgagtccagattgcaagggctccggcgccagtggatcggccattgtagtcatggccggtgttacggatgacaagacggatgttgtgttccgttgcgaatttcaccgtgttggagatctgagccgggctggtgacatccacgctgtagcgcacatagttgcccagtgtgcagggctttgagacagggtggaatggatcgcaaacgccctcagcaaagaacggcgccataatcgaggaagacgattcatagctgtcagaatatagtcagtactgaccctttcgtgttattctacatgcaaagcgacatactgttgctcaggaaatagccacccgtccttcaagacggcacaggcctcagcattgtagttcgggtcatggcaaggggtcccaagagggacagttttcactagtcggccatcgatcgtctcgttaaattgagaccattcagcacttgtgggccagcattcagcatcatcgggcagacatcggcaagccgatgaggctggctcaggtagaattgccaacagcgaagcaaggaaggatgcacggaaaaacatctcggattggcttcatgcaaatgtatcaggtttcaggttcttttaaatgtgtattccttatgaaagctcaggggcaattcgcttacaatatagaagaatccacagtatgcccgcaatatgagttgcagctaatccaccttgctagccctggaaaccaacctcggaatggagattgttccgggacttattggaagaatcgaccactcatgggggttttccccaccattcagcctttggaggttggaacctgcgaactttgtacaattttcaggaaactttaaaatgagacattccatggtttcatggtccgcgctggcccgatcaaccttccaaggttgtcgaagtattttcccgcatagtgtggctttctgctttggacgttctgaaggatattatattctaagacatgttctaaagcatgttctaaaagatgatatttgcttatttatttatttgtttactattattattcatcattatttattatttattatttttttctaaatcatccaggttatataatggataatgcacatgttctagtggcttgctcatagctagctaagcaatgacacaaaaaccaggaaaagcaaattattggcaaatcctaatttccaaatccatattgttttccatggtttgtgaatctagtttgttgcgacttaattgcactataagcccccaccgacccacccacctgatgaaatcatgccctcgtgcacgatgatcggtggactctgtaatgattatgaataagaatgccacatccccttgcagaggctgccaatttcccttactcgtgataatgatcggatcatgggctgggtatacaatctccacgagaccgatccaaacagcgacattccgcgagtgatcggggtctgtttggtgtgctcagttctagcctttctggccgtatgtctgcggttctatgtccgaataagcagcaagcgctctccatggattgacgactattctgcactggtggcctcggtattaacgttagcatacgccggaatcgccgtggctcgtgagtcaattcattgattaatgttaactgcctaactgaccgaatggttatttcagagacacggtggggccaaggactcagtgcagcctacttcccaaaggagaatgttattccttttagcaaggtgcgcattgcaagaccaacattgttcgaactcgagcctgactcttaactttgctctatagatccaatacgccggcggcccggtctactgtctcgctgtcctcggctttaaggtcgccttgttgacctcctatctgcgcatcgcggggattatcgagcgatatcgcaaaatcatatttgccgccatcgtcgtgtgtgtcattaatcaattgatcttcacctttatcatatcaatctcctgcacaccggtcagctcctcaacagtgcgcaccaattgaagagaacgggttatctgacattaaacaggtcgcaaaacaatgggatagttctctcgagggacattgcatccataccataccattctactttgcactgggaggcacaagcatcgcgttagacctgattatcatagcactacctctgccagttctgtggaaactccagctccgcctcaaacaaaaagtcctcctggccggtctgtttgctctcggcttcttcgtgaccgtgatccaggtcatccgtatcttcaccgtcaaagccctggaaacctacaccgatagcaagaatattgtgatctggtcttgtgtggagaccagcctgggcgtgagttaatttttgacatctcttcaagtttaagcaagactaacgaaaatgtgcaggttgtcatcgcctgcatccctacctacgggcctctgttcaagtccttcgcttccaccgtcacttcataccgaaaccgcgacacttcacgtacttatgcgcttagctctgttcgccaaggcacggggacggggtcggcgattgcacgcaaaaagagcaatttcgagcctatatatgagtccgaagggccgccggttactgatattcgatccggagcgccgacgaatgatggggatagcgaggagcatatattgtcggaagcggagaacatgaaagtatatgtgacttcggaatttacggttaagcctggcgtcgcccattgatttggcgtcgggccttggagactgtgacttttgaacgatgagaaatggttgtacatataatattcgataccaaacacgtgtacgagggtttttacgaaccatcatgataaccggcctaatcgggatgccgcctacactaccttactcctctaccttcccccgactcatacctacatgggtatgtagtattagttgacacagtgagcgggagaccgcttgatctcggcactgtgaggatgtccattttctgtgttggacattcggcgtcgcgtcggtgcacccatccatcaataacaccgacgatgacaaattcaatctggtccgaatgttttgagcgagaggcctaaagcttgagacattggtgactttataccctgtcgttctcttacctatataccccagtcgctctaacctttaccccagcggtgcaactacccttcccacttcggtatattaaattcacatgttgtttgcctctttgagcttccaaagaaggaaaacagaaaaattaaaatggcagcaatggttatgcgagtattcacggcattcggcccccgaaagttgagaagaagaatgatgctatccgctttggtatcctcgaggctgcccagattgcgtgagccgcattcaatgcttgaccttagaacccatctgaccttgttattcaatagacctcttacctagatcacactcgccctctcacacccagaggttattgtacaagcagtcgctgctagagataatgctcgtacctcagcatccaccaaaaagcacaacatcgcggatgttcgcacatcctatgacgaaatcttcgaggaccccaagatagatgcagtctttattcctttgcctaatagcctacacttcgagtgggctgtgcgcgccattcgcggtggcaagcacgttcttgtagaaaagccatcgacctctaacgctaccgaagccgggattcccttcaacctacctgaactgttacagccaaatgcctcgtaaaaaaaactgctcgaggcattccacaaccggtttcatcttgtagtgcagaagttccggtcctttatcacccccgctgatgtcgtctacgtccacacagactctatgattccgtggttaatgcttgatgaggataacattgggttcaactacaaactcgctggcggaagtataatgatgctaagcacatacaactttggcattatccgcatgattttcgacgataatcctgtggagtgtctaacctgatgaaaatgatagacatggcgtatgaggagagcgggctggggttacggccaacatgtctgttccggtaatcgagctgctttggaagaaggctacgtcttcgtgttatgattttcgttattgtttggcttgcatatatctctttaggtatatttcttttatagatcttctcacccttaatcagtgctgtagctagaaggataagaagtagctgtcataacctgcatgtcacatactttgatatctggtggagatggcagaggaccaggtagttttacctgtgaactactcggattaggcatgcactgtcgcaacatagtcatatgtaatggtttttctaggctcatataatgtacccggaagccaatagcaaaacctccatgcgtatgcactgggaaatttccaaaaacgtcgcttttggctatcgaaacaatgagatcgaaatctataagcagctagtgtacgtagctagtagcaaaccatttaccaagcaaaaaaaggtaaaagaacagtgtatgtaacaatgaaaacaaagtggggaatcatatgaacaggtatcatgaaacatggatcgggtttaaagcttgcgcctgggttcagtcatattcaaggcaccgatgatgacagttcgatgccggagattttgagagtttgggagtctgcgacgggagcagaaacaatcgggagatctagaggggaggtgtgggtgatgaaatcggagcaaatattgagatgaactgcaggcaacggcctgcaataggtctctaatcttgtacagtgtacagtgttggaatcaaatgagattaagattggggcattttcacagcgatgggtctgttttccatgtgcctgaaatcgaaatgttagtactatgtccacatgagaccaaacgaatgtgccatagatagagacatacctccgaaattgtgcttcacaaaagccatgggatcgtctggatcccctgcacccatttgccccacgccggggctgaagctggtaatgggtagaacaaccacatccccaaccttgcggtgtgtggtctggtggctgaagtcctcgtatgtaatgttcttatcacccggctggatattgaagtatgccgggttgttgaagtagcggaagacagaatctgtccaggccccaggccccgtgaactccataatagtcttatccatcttgccaaccttgagaatgccggcccttttcattcgcagagcatgctcggtgacataagccaccatatcacggagaatcggatgcccaggtttagacaccaaggtccactggcagaactgaagacggcgcgaataccagtcatgccagtcatcgcgatcaggatcagcctcaattccaacaatgagtccgatagttgatcgatcaagttcctcggggagccacgtgtgcgcgggcctgagtgccaacgtgtcgatatcgctgtatattcccccgcgcgctaggagtaccaagtaccggaagaaatccgccttcatgaccgcgagcggcagtgaatcatatgcctcgaatacttccggaactgacccatatagatacttgatcaggtgttgctgtgtctcgtcggggatgacttcatgcgtgaatcccgggtgcatctctgtccagctggcctccagaccgcggaggtcttcgtcaaaccagaacgaccctgggtcgtatttccatgtttgccagatgtatgcggggaatttgttttcgattccataggggaattgataccggagacgttcgcgaaggggtgctgtcggtgatgcgccgaggggtaattgagctcgaccttgcggtggtgttttccgtgctaagtttgatgtcacttcatcctcctcttgtgatatcttcttcaccggtctgtacccaggtgccccaggaacttcgggatctcggaacgagcggaggatgagaacaaatgtgaccacgcagagcagggaaagcagcaccttgcgcggagtgatcatgacaggcgaacgagccagtgcagtcggaaaataattcgctggtcatgcgacagccgtagattggctgaaaggtaggagtcaaggtctttgtgcttttgtgtcccgtgatccgcaaactcggggagttcgattagttttggtatgggattcgttcggcgagtgtgagagtcgagcgattgcagatcctaggctaaagaaattaagagggtgacatatcgatatgcggaaatcttggatgtgaccttgatggtcgaagatacgtcaacccggaatcagtcaggataggaggcgtcaaaaccccaatgagaattgtcggtcactagtaccacagaacaggagaaattgagtcaaaaggcagaccaccctgtctggcagcaagtactttatcgccttgctggccagtttcgctagacatcgactggaataaaaggattgcgtattccggaagcagcttgtacgctaggtggagccactcacgtggtcttaggcgaaatgtaacttaaaagaaactacctaggtacctccatatatgtatgtaggtctgacctcttttgatattgtctattcttcgtttgttctttgttctgtattttgtgtgttcatttttcattctttcggtatactggcattgctgccatataaaccacttggttgcatcagagcaccccacatgaggtgctcctttcgtatccagaatgggtgatgatcatcccgagataaatagttagttaactagttattactcagttagttagttacaacttaggcctgacactctcaaccactcttaatccggatagaatgatagagctatatgctcaaatgagttgatctagggccaaacattgagggtggtttccgctgacccgctgcaaccttagaagctcggacagtgatataagcttcgcttggcttgggaatgaatatagaactaacatcatcgccaaggaaattggctcaggttatatattgcggtattgagtgtatacaacaggactgtacatatattcattagacaccattcttgcttcctcttgctactataaacggcggtattagcagttcttttcctttccaacaggctaggactagctctgctacattaccaggagctcagatctgacttttaaagtacctatttcaaagaggcgtggacttttcattgcaagacaacgtgattcctataataagcaaaccaaaacaagaccaaaacaagaccaaaacaagaccaaaacaagaccaaaacaaaggaatatcacttattcgctcctccccaacgcataagagcacacaaattgagaaccacctgtctcctattggatacactgctcaggtcgtaccagggggtggccaccacagtaatgcacgggcttggcgagggtgaaccaaagtcccgaagatactcttccgtaatgttgaattggagaaagcaaatgtagtgctgcgtagcgtggatgactataacatcatcaccgctcttggaatcagaaatcctagccagcaaagcctcgcatgtcatctgagctagggatctgtctgagatggtcggtttaccatcctcaagcgcatggaatctcttggcttccaaaatcgctacacgatcgtttgtgagtataaaattgtcctcgtctcggacacgtaggcaaagacctccgtcatcagtggccttgatcggcttgcctatagactgtactatgttggtggctcgtaacttgagatcccgaaattccacaacatccgacatatcattgcagtcttggggtgccccaaaatacaggacatgccgaatggcgcatgatacgaggcgcaaagtgtcatcttcgaccgtagctcggagtttctgttccgcaccgtcgatgtgaccagttgatgatgcactatgagagctcgcagcatgtggactgctagaagcgacttgcatttccccagagtggacgaatgctgggttttgattggtttttctttcacgcgccggtcttccactggttctagcgtcgttgtcaccgtcagaatcgatatccattggaaaatccgaatccgaatattccattccggaatggctcccatcatccgaattgctggcatcaattgattgctgtgtcctctggaagtcacggttgcccttgaatgctgccaaggctgcccacgtctgagcgagcgatatgctatagccaaaatttcgcacaaggctatgctcgctcttctcgaaatgcagatgatcggggccatccacgaatttcacaatctcaaccgggcccatcgcgtcggaagattctgagtggggggacaaaattggaagaatctgttgccttgcttctcgtactacaacgcggcaggcaagcaggtgatcaaacccccatccacttgcggaagtcatcgatagctgggaaatatgtttcacatacgagtcagtgaactgactggcggttgtgaaacggttgaaataatggccgggcatgttgaagatcaaatttgaaaaggagggaagaattgtgatgaaaagaacacatcctcgcagatactcgagtagtcagtaccttttatactacctcttgggcaaatattcgccttgccgccaggtgaccatgaaaagcatagttgttggttgtgccaacataacggtcgggccccttgttgcgaaaccactggcttcgagtacagcatgagatccaatcctagtctgttgggaattaatgggcggttaactcacgaaccaaccacatacccgtggatatctatgaattgcatgcacctccaggccaagcggcttagagacgccagcaaatccgggcccaggagagtatatgatacatgatttcttagacctctttgatccttattctaggagtatttacttacttatataattgctttaagcacagagtattaaacagcctcttgctatatctctcgcgtaccattatgggtgttgccattatgtccacagcatgggcagcactaatgcaccacctacctaggtgggtatatatatccaactcggtataaacccatacaatctaggttggaggtagtaagtagtttctaacagctctgatgggcgagagcgctttccctaagcgccgccctcacaccaggccagccatgtgatgaacacaccgttataatggtagccaaccacactcgaacatttagcgccctcacttcagtagacgctttcaggaatctaatctatgtccgacttgtggagtattcgagtattcgagtatcattgctattaataagtccccaagcaccaaaactgcaagcccattgacgttgggtaaaatcacgcgagtattcggggttcctactttcgggcgtaacctacccgtgtttgtattgactgaacataataaactagctgaaacgcctccttagatctgcattcttgctagttcaaaggggagataccaatacttttcactatgtaaaccggaattcctgtagttgtggcagaaagcatggcagaatccagcgtcgcacccgattaagaaggcggtactagagtttcaggtcagattaagatttggggtgtcaatataccaatcccttgtatattccttccctcagcctacgcagtgatacttacaattatcttcagtatgtcatctaatggtgtgatttcacttgctgagctcatgaaccatcaccgtgatctcctagttcagccgatctgctggacttctcgacatctggagatgttgggatgtcggtttgaacactttgaccatgtgccaactccaacagacgacatcaatcctgatgcaaatacatggcgaccaatttataatgacaatgagcttgaaaaacggcccgacctgctttatgaggaagattttgcagaaggtcacttttcgttgtgcccgcatgtctatttcggacgtctcgtacgtccgttgctcaaccgaaaatggtgcgcaatacaggctattccttgcaatacattggtccatccaaccatgactgacttgttgcttgcagtgaaacaccatatttcttttttgcaaataagaggattcatcgacctcaatacagcgtattctatcgctctcgtaaacgcagccagccagctgacaaggcaccgcggccaatcatcggatatatgcactatcgtggtgttgaaaagtatcgccaagagatgtttccattttctgatcctccggaaggttattgtaaccgtcccggggggcaaattcagctaaaacgagtagcccaaatcacgccaaagaattggagtgaggatccatatctgctgtgtgttctgctttcccttgcacagctccaggaataccatcgcagagagtggcacccgcccattcacgtagtaagtgatctgctcatcaccgctgctttcctttttttggacgcctagcttattcattcaagtcgcgtctgtttttaacacacggaccgggagaggagtttttccatatttttgaagctcacatcacctccgagcttcttgaaatgctcgacaacccaactaccgctacaaagcacatagactggccgatcatcaggcacataagggtcccatattatcccctcgaagatctcagagaacgaattcagactgagattgcccgggatcaaccacctggcacgtttgacatttcagatccagtccatcgaatcttactcccaggaggcagaagagattactcggaagacgctgatacaatccacatccaaagaagaaaagaagttaaaaaaaagaccaaaagtaaagtcaaaaaaacgagtcgttcgtcgctctgagacgggatcttggtgaaaatgcccaaacgaggatcatgacaggttgtctggcgtctgctatccgactacaccaaaccctcgacggcttcacacttccttaccatcgaatggtgaccctacgcccaggatcccactgtcctgtttgcgatctctgaggtacactgctatgataggcattacacaccacggaaatagaatttttaaccgtactggaggctgggggtcagatggtggttaaggggtaaagggcacggaatgggtctggtatttctcagcttcctacaatcgattcgaccatcctacgaagtacatttcgattgggacaacttcatggtggaaagattgtgtccttgaatacgacatgaagcaacacacaataagcgtgaataaccaagctagccaagtgttgtgctcaaatggcggagaaaatgcagcaggaataacgtgaatactgttgaagctggttgaatctattatcttgagtattactcaacagcgaaagttgtgttctaagagccagacgaggagaatgagggctggccaaaacataaatatgtacacttaaatcatgaccatgttatactgattaaaggtattaaacatagctaaaaccgagtactgggtgaagtataaaggttctattaggcaagtcccgacctaggggaggtttttcttaggcggaggtttactatgggctagccattcgccccaaattctctgatgttcgcatccatggacaacagtgccagtctctcaatgaatgtatgcctgataaagcaagcttattctcaggacagctggagtgtatatatagcctggagacgactaatgcgtctgatttccaacgattattcaaatcactcgtactctcccgctatacacagagtcctttctgtccgataaaagttgcaataaccttggaatgcctgccgtatgttgtacattgtatatacataatagtacttcaacgctcttgtctccgccaatcaccgatgtcggtgatgacgcgactctttagtgcctgaggtatcaacatatattccccgatacctttcaaacggggaagctttctttcctgactcacacagattctaaactcttataatgcagtcatttcgaggtgccgctcgagctgcttcacgcataatccgaatccagccatggcgacaaggcaactctctcgtgaaccccgcggggccacatcggactttatcgacgcaatggaagcccacgcgcccattgcatactgtatcgccgcgaaagtcagcgtcggtcgccgcggagtcaactgatagagactcgtccaatcctgccatgtcattcccatgtcttgatgctcaagaagcaaagtcagcgcagctctccgctcggtcgctgcaatccggccccgaaccttcatacacaaccgggcgacacgaatcataccactgtgaacaaccacttttactcgactggggtggtgtgctaccggaattcgatatcgcttacgaaacctgggggcaattgaacagcgacaaaagtaatgccatcctcctgcataccggcttatccgcctcaagccacgcccatagcacagcgtccaacccaaagcccgggtggtgggagaagttcattggccccggtttgccactggacaccgataaatatcacatcatttgcaccaatgtgctcggaggatgctacggcagtacaggcccctcttccctcgatccgtccgacggaaaacgatacgcaacccgtttcccgatcctgactttagacgacatggtgcgtgctcaattccggcttctcgacggtctgggaatcaagaaactggctgcctctgtcggatccagcatgggcggtatgcagagtctcgcagcaggcgtcctcttcccagagagggtcaacaagattgttagcatcagcggttgtgcccgcagccacccttatagtatagcaatgcggcacacgcagcgacaggtgctgatgatggatcccaactgggcgcgtgggttctactacgatggaatcccgccgcactctggtatgaagctagcgcgcgaaattgcaaccgtgacgtaccgcagcgggccagagtgggagatgcggtttggtcgccagcgtgcagaccccagcaagcagccagctctgtgtcctgatttccttatcgagacgtacctcgaccatgccggtgagaagttctgcctcgagtatgatgccaacagtcttctttatgtctccaaggccatggacttgttcgatctcggccatgcccaccagactgccactatgaaacgtcgcgcagagtctgaggatcgcattgcgcatggcggtggcgcaccaaatgtttccgaccccgcttgcagtctgacccttccagacaagccctatgaggagcagcctggatcaacttctaatgtagtcccgttggatgagtccgtttccgctgactcagtggatggtcctccccgggaccttgtagccggccttgctcctctcaaggatcatcctgtgcttgtcatgggtgttgcaagtgacatcctcttcccagcatggcagcagcgggagattgccgagacactccgtgctggaggcaacaaaaaggttgagcatatcgagcttggtgacgacttgtcgctgttcggccatgacactttcttgttagacctaaagaacattggcggcgcattgggcaagttcctgcgctagtcgcgtggtatattgcgtggcaggcgatggaaataatataaatttgtcaatatgtggttaagcgtgcgacattcagtatttagccggcgtttgcattcacgaatggaaatgagatacctcctctctgatttttcttgcagttttaagggatcaatggatacgtccacacagtatatacgtacatatttagccatcgtacggtaaaggaacagaaacgttaatttattatcccatttgattctatcaagttacaacatggtgaatgaagtccacaaaaataaaaggaaactcgccctcaggttgctctcagttttcataaccggcttccagctgtgtaaacggtccacaggcacgaggtgcgctaagtggtgccatcgtcaagcagatgcctgcagtattggcttatgttcgtctcaataacgaactcatcacagggcgagaaggagaaaagaacagaatgacacaccacaaagccacaatcccataatgtcatcatccacaagacaacagaagagaacagatttaaaaccaacaccgggagcacaagctaggatatttgataaaaacaccccaaaacacccccgagatttagttcacgaactaggagaacctaggacggtattcaatattcataaggaaaactgggaaacccagaatatcgttgatagtcgaatggttattgttagccaaagccgccaaccttgaggcatcaccttaatgtattttcagttgatctcagagctcgaaagtagtcaaagctgaggaggatagaaaaaaagggaggaagtgggagagggcaggtatttatattttgggattagagctgcagccacggagtccacgaagggaaggcttgttttgcaagtgatgctgcctattacccttcggtaacgtggacactgcgtagcacatcacatcatgaatggctctcttcaacatgtagaacaaggtgaacagacaactgcatctgacatctaccatttgaacacgatgataaaatcatagacccttaaaaaattatcagaaaggcaaccgcctatcacttgaaaatcgctagaggctgtttggttgactcttcggattagcaggtgttgttagtagggctctgggataacaagtgttgttgttggctattgtttccgggaactccacatgagagccaccttgggtatagcatgtagccgtagccatagccttgtagccggcgatttgaagttgggcatctgagcttggaggataccttgggaatataaaattgacaggaacctggaaagcacagatgttgattttatgcccaggggattaaacgttcttccgccccggtgctatactgcgctctgcctgaggcacaaacaattacaatacccggggcttttctactgcaagttctctatacggaagatgtttagttaggaagatagcccaggaactcttctctacaaatcagtttctaccaagtcctttgaacgtgcatttcttcgatctgggaatgcttatgcgccaacggttctttcagatctccggtcaatcacagcgatgtcacacaagaaaggagcagacggcacggggtttcatgaagagcaatttgttgtgctactattacaatgaaattatccttcggtaaccacaatatctacgcgcaaagccttacatatcaatcaatgcattacaaagcacactgacctgccgccgttcttgacgattccaaatcccattgtcaatttgccaataccagctttgcttatctggcacgtgctgcaaagcaacttgttcacctatcacctcagaggagctccgtggctgctgactggactactcaattcagatataaacagcgccgctaagctgtggatcccattccccactattgcccatactcgatgtcatagtactaagatccacacccggggccgtgtacaaaaggcactgaaatacgcctgtttctcacaattcttgggagtagcttctcacatcagtggacttacaccttcaaagaggatgtcgcagtcaaaggaatggcaaaagatgcttcgcggcgacctatactgggcatgggacgaggatcttcaggcaaacagaacaaggtgtaaacaggcctgcgatgatttcaatgccgccggggctgcaacaaggcgccggaaagtagagctatggagaaagtaagttcgagcgatgtgccctggatggtcatcgattattgctcagtggcctttgtgctgaccatacttgtgtccagcattgtctgcgacacacgtctaatgccaccattgaacccagacccgaaagaagacgaggcacttttcgaagagactgatcccttcgtcgatggaccgatttctgtggaccacggtttgaacttcaaagtcggcaaaggcacttttctcaacttcaatcttctcgtgctcgacacctgcctgatcaccatcggggaacgggtgctgtttggtccaaatgtttgcctgtatggtgcaacccatcccatggatccggctattcggcaagggctgaagggaccggagtgtggaaaagaagtgcatatcgaagacgatgtatggattgggggtagtgtgattgtgctggcgggcgtgcgaatcggaaaggggagcacagttggagctggctcagtggtaacgaaggtcagcatattgagatataatatctctaattccacgttgagaggagccaaactgacttctgcaggacgttcctcccttccattttgtcgcaggcaatcccgcccgagtcattcgccggattgaaacgagcatgaaccctgaatagcaacaatgatggtggtgtgaatgggagctaatggataccgaggctaatccgagcatcttttagtaggcttttgcaacagagttcactcttgagtgccgaatgaaacttcatcttcacactggggctcaagttaagatacatgaacagggtagtacaccgcggaagataaatattgctattgaaggagggggataaggttgcgaaattgcccgctactacctgggtgtcgaaatgcgccgatgccccccatcttgacgaaaattgtcaaattgtcacgcgagagcttgcatttcatcaccgagatggaacaagcaaaaagtcatagcgaggtcgtagaccgcgaagtcgtatatgatagcaatgctggctctgggccagaagcagcaggcagcttctcaatatccgatgacgatattctgcgggcccagggccataaagcagtattcaaacgatcattctctatcgtttcatccctcggttttgcgttcaagtatgtttcccactcattatatttcgcacttattatactgaactgtctagtatcacgaatgcttggactggcgcgctaagcaacttcggacagaatctcagatacggaggaccccaagtggctctattttctgttgtcgttgcttgctttgtgcagtggattattaccttaggactgtcggagctggcttccgcgtttccttcatctggagtaagttatctacggcgtgattgttgctcggacgtataatctgaattgcaggtgctatcttatagggccaataccactttgtctacataatcgcccccaagaagcacaagagatttgctgcttttgtgacaggttggatgtctatactcggatggtggatggtgacatgctccgacctgtctcttgtccccaaagcagcactgggtctcggtcaatttctacatccggacttcgagatcaagcaatggcatgtatactgcgtgtatcttgctagtattgctgtgacaagtcagaccccgttattgtcaggttgctttacatttcattgctgactcgggttatcctgtatagtgacgccccttctcttgtgccccaagaaactaccactcatcgcatcctggtctctatacctcgcattatctggatttgccacttggttcgtaacagttcttgttatgcgtcagcatacaaataccaggtcttatatcgtcagatctggtctgggtacaagtggatggaacaatggcatcgcctggcttctcgggattaccaactcgatgtattgtttcagtgccagcgacggagcgatccatatcgccgaagaaatgcgatcaccgggtcgtcgactcccacagatcatgtcagctaagacctgcctcattctccatccctaattccagttggttattaggcccgctaaccaagctcaggaacgtgacactagccattggcctctgtacagcggtgccgctgttagcagtcttgatagttgccatgaaagatatggatgaagtaatgaacgccggaatgccagccgtggaactattgtaccaggcgacaggatcaacaagggtgactgtggcgcttagcgtactgttgacaatcgtatacgcagcagggatttctccacagtgggttacctgtgggcgtcttgcatgggctttcgccagagaccgaggtactccgtttcccgatttcttcgacaacatagacgagcggcttcaatttccgcttcgcacgactatagcctctacggtttttgctgctatctatggtctcatataccttgccagcaccacggcgttcaactccatcattacttctgccgttacgctattgaacttgagttacgccattcctcaggctattctcgtgacgcgaggtcgtgcacagtgtctgccaaagcggccgctggatcttggtcgatggggatatatctgcaatatttttgcaccgctgtggatcacagtcgtgggtgttgtgatctgtttcccttatagtcttccagttactgtgggctcgatgaactggagtgcaccggttttggtgggattgtttcttatcattcttattttctgggttctgataggcgacgagttcaagggacccgatattgactggggcatgttgaaccttaagaatgaagcgccaagtgacgcctctacatgtggttgagtcgaacttaagcctgtgatttggacaacatggctgcatttgtgaggcttgggcagggtggtttttggatggtctcgggtcggctatatgcttctctcgacgttggccaggcgttataaccaaaccggcactgtctcgtgaaatttatacaagagcaagcaagcgccagttgaataaatgaaacaatctgtatttgattaaaatcgaagtccgaactagatgggaagaagctcccaagatccccaatcacagatttgtaataaaatatgccctcagattgaaaactaccatgttttgtcactcgtcaccggcgtacttgtcgtttccttgaaaggcgtacagacgaagcacatatacagggcctcggagtatgtaactgtattttctcatcaccgggatattacatgaggatggggatctgaaaacatccctcgatgaatagagtacttggaaggtaaaagggcgattggtgaagagaaccggaccagagatatgattttggagatctagaatatgtacagcaattctgagcgatgttagtcgaaaacgttcaaatattgatgcgaagccaagacagcacatagcaggaaatatcaaggtccgagtctcttcagatctctgttcattgctcaatcacacacttatgggccgatgtcttcttccactccgaggtatcagggggatgaagtccataccccgacgggtttattcaaccgacatgtcatgagaagctcttgtgaggtttatcttcatcaggacttggcaaactcgattgaatctgtgttgtagccaaagaccagagaaccagtttgaaaaagggaggggagaggaaagaaacatacctcttgtgatttacagcgaagcaataacccctgaacagaagcgttaacattgcgtcgtcccaagcgataaaaggcagttgctgatattgaccggcaaggtattatcggattcaacatcaagccgtgcctagacgcgtctttctcagacaggctctgcagtgacattgagcctgatagctgtatcggtctgtcaacaacaactttctatcggatgagatgatgcaagagcatatatgacactgtcaagggatcgcatgtgtgttgttaggacacggtttggcacgatgatggcgcgtagtcacatttaccgcctaccataccgccttacttagtccccgcacaattgactaggaccgctgcacgtgatagacagcgtggttccactgatgaacgcattggcttgcatatacaccccggtataagaagctcgtgcctgcaccggtcggctacttgtgatggtcagtacactctacatccagaatggctcccccggcatcaaaatggtggcaagagcccagcgataccgatctcgactacggattcgattctgacgaactggatactagatataacgaacctgaccgagacacttcccacggcaataaaagcaaaccgagagacatacagaatacggacgataagggcgtaattgcaagcatgtcttcttggctccagcgtcaggctggctcgtcccacggacagcttgcgacagcggctgtcgtatctggcgcagctgtcgcaggtgctatctttgggtaccagtcatacaagcgcaaggaagctgttcatgacctcaaggcctcgattccaggtattgatgatttacatactgcggaaacggtgagctgcaccagtgaagctgcgcatccattgcctagcaagctacaggataaaattgctgattggccggactatagctcactgattttggggctgcctcgaatggagtacaactgagcaaggaagatgagcgcagtgcagctttagctcgcagagcacaacagggagactacgatgatggtatgtgacatttctaggccttcgttctgcaaacctttctcatttggcctgtctcgctttggtagatttgattcttgaacagctcgcccgcaaccgcgtgttcctcggcgatgaaggccttgccaagcttcgatcgtcattcgttgtcgtggtcggctgtggcggtgtcggttcgcatgctgctgcttcactggctagatcaggcgtgtccaaaatccggctcatcgatttcgaccaagtcacactatcatcgttgaaccgacacgcccttgcgacattggctgatgttggcacaccgaaggtccattgcattcggagacgattggaacaaatcgcaccctgggttaccttcgattgccggaatgagctatacggaaaggccgcgtccgacgatctgctcggcccctggtctctgacacacgatggagagggccgtcgaccagacttcgtgttggattgtatcgataacattacatccaaggtagagttgctacactactgccactcgaactccttgcctgtgatctcgtcgatgggtgcgggatgcaagtcagacccgacccgggttgtggtcggcgacatctcgcttagcaccgatgatcctttgtcccgcagtacacgccgtagactcaagcttcttggtgtttcgtctggtgttgcggccgtgttctcgacagagaaaccaggcccgggcaaggctactctacttcctctccccgagggggaattcaccaagggtcaagttggtgagcttggtgttcttcctgacttccgagcccgcatcctcccagtactgggtaccatgcctgcggtgtttggttacacagtagccaaccacgttatttgcactattactggctacccgcttgactacaacatgggcgccaagggccgcgagaaactctacgataccatcttggctgctttgctaagtttacatgaaagaatgatcagacaagtcaccggccaagataccgtggggctccgtgccccgctcagcaaggatgatatcgcattcgttgtggaggaagtgtaccgggggaagagtgcgatcagtggcttgtctaacagactggctctcgtcccctggcacactcctggtcacgggtggaacatggatctgagccttgagaaagagggacagaagaccatcccgatggacctcaatcaaatggtttgcatgactaaggaggaagcgctccgacacgaaaacgaggtgcttaagggtggcaagaaggtggaagaggtgtatgatgagactgttctccaacgtgtaaacctgcgcagacgggaagcggaggagtatgatcagtaccgaggatagtgtaaaatgtacaaataaacaaaagcacaaaatcagatttggcgaacaacataaagaagtcgagcatttacccgcttgctacatgtgtatgttgtacctaacagaagaaagcgggtctgaggtatacgtcagagccgcgagggttaaattctgcctcttcttcacattcttctatgttgtactcccacacagtttaaccgaatgcagtacatcgagcatacattacacgtggaaataagaatataaatgccaactagggtgcaggagcatgacatctcgcgactcccatccgacagataacgagttccatccgaccacaacccaccatccctcctactcaaatcagtctccatattattctcgcccagttgattccgccagaaacggatggcaagtcggagcccatgaaggctcccagcgcggctccagttcccccgcggatgacatcaactcccccggatggtcccaaatggccctctcggtagcttccgcgccacgcttccggcgcttagtgctgatctacatcgcactgtttatatttgcatggatcggctggcgaatgctgctttctccgcgactacaagaccaaaacttcctgttgcattcacttcacccgacatctaagacagagacaggttggtggttcggggtaaattcatcccctcagcccggtctggttcagatccgcacattgaacccagacctggtgcctggggatctagcgggtgtgaaggcagggaaatccagtcggaagcggctaattattgtgggcgacgtgcatggctgtaaagaggagtgtaagtaacaacccccgaactatgggaattcttaaattgacgagtctgcaacagtggagcaacttcttgaaaaagccgccgtcaaccaagaaggtggcgatcaccttatctttgtcggtgacatgatcaacaaaggaccagacagtacaggagttgtggacttggctcgacagcattcagcatctagtgtgcgcgggaaccacgaagaccggattctgcttcttcgacaagagatggtgaagaccaacactcttgcaaaccccgatgacgatatagactctggtttctcagccaaggaacttggcgagcgtgcacttgcgcggtctttgagcgacgagcaagcccagtggctggagaactgcccagtgattctgaatgtcggccaagttccaggcatgggccaggttgttgtcgttcatgcggggctaataccgggaatcgagcttgagaagcaagacccttccagtgtgatgactatgcggaccattgatctagatacgcatgtgcccagtccgaaaaagaatggcatgaattgggctaaggtatggcttctctttctatttcactcctttaatcttgccgtcatattgatatactttcaatctagatgtttgataaacatcaatcaaaactgtactcaagcctcgagacttcgactgaagatcctctcgcagacactatgactgttgtctatggccacgatgcttcgacgtccctctctattcgcacattcacaaagggccttgactcgggttgcgtgaagggaggaaagctcacagctttggttatagaggacggcggaaagcaaagtcttgtacaggtatcgtgccgtggctatttaaaagaatgacagttcttcactgttgctcatctttgtagagaaatgcattcttataaggtggtgatcggaagtactgtaccatcggtctgattttatgatctcgtttagtgttgcaatcagaaggctgattcctggaataaataagagattactaataacacctgataatggccgtcacctaataataatggcctcgctgtcgagcttaagcctgttcaccgcttgtaaggcggggatatagaagctaccccgcatacttacgggggcgggatgaagtaaccgtggccccagggtcccttgatggccgagccaaccagacaagacattcgggactcagatcttataacgaaataccaaggtaatggaagatagggtttcttccaggataatccggctaagggccgtgaggctccgatcacgttatgtctcggtccaccttaattcgctgacactaaccctctttgtagcttagtggcagctgaatatgcgtgagaggtagcacggagctacggccccggagccggaccccgtatctcaaggtctgatcccagtaactataccgaggatgctccgtttcagtcggtatataagcaggtgctgacagcttgtcaagtacctgcttgtctatatctttagtctttatctatacgcttccaacagtaagatacaattgatcgtcatctaaaatcttatgctaacatctctagtgtctaacaacaagatcgttcctcttaccattatcaagggtgccggccatgagcacatccctattcccgagggcgactgcgccattatcgccgacttccactcaatcaaatcccagagctcacactctaccccttacctgaccactggactctaccgtgttgtgcccggacctacacgatacggcgcgtacgactacgaggagaccaagtttgttctcaagggccaaatcgacatcacagtaagatcccattcgattttgaaatctgcattacgaatgatactgataccatacaggatgaggccactggcaagacccaccacctcgttgctggagactgggccttcttccatgttggatccaaagctcaggtttgttctctgtactctaaccgacctgtatacacttgctgacccatttatagttctcaacaaagactgagggtgttgctttctacgctgtcacccgaccaatgaacagcggtcaccctaaccttgttggccgcgaggagagcactacaaagttgtaaaaatcaatgctattgtagccttttagatgaattgaatgcacgattcatgatattccgtctcgttcagggtaattacatatgtatagtgccaagtggttataagtctcaggaaagtgatgtttactagacttggctgaagaaccttgcgatagaagggttagaagattagaattacccctgccccagcttgtgtctcaatcgacaccactacaaagaaggtaaatacgcgattgttggagaacttaatcctaatctctatctcttaataaagagatagcgtccttcgctctaaatctcaactcttgcccttcgctatactattgctacaccttgatttatctctccgagatatccaataatgttataccatcttcaatactattgccacataccatgcgtcttgagcccgctactccatgccgtaccttactaccacagatgtaagcaggaaataactgtacctaagtaggactgagaacttactgtaggaaggactagaccggaagataactatcatcgaatatgtcagagcgcagagcccatgcgtcggaaatctgtcaagaatatccatgtctgatttcaactaaagaatgagggtatgtacagatggaatacaccacagttctctattcggattcggattcaggatcctcggggatctcaggatcccggaaagcaaaattaccatcgacgccccaaacggcgggtggggaaaagtcttcataccaaagaccgcccaaagcattagtgtgaacgaatccaaaacggaaatattccaactcgttaggataagtacgagaccaagtgaaatctggtaaatgctggccatccttaggtcggaagacctggaagcgctccacgtcgttgactaggacactgaggccgtcggcatggggttcaaggtccgggaacgagaagacgagattgtttgcatcggtcatagaaggtggatatatcttaggtggaacggtaccaagtttggcaccatcaaggagagcgcctggagtttggaggatcgaatcgaagccccagcgggcgatgccgtttataaaaagaccaataaggatgcctgagtatagaagactgggtcgcgtttgcatagtcgttccaggaaggaagagaagagaaagaatatagtggtggatgcgtaggttcatgttcggaacggcgacaagaatgagaacaactgcaaccaggatgccgtatatgcttatcgtagggaagaagcggccctcgcgacggaaacagtgtgcctggccaaaggcgattgcaatcagagacccaactacaattatgagagctgtgacagcacccggttgctgctggatatcgtggggtgtcaggcgagagattggaatgcgatcaaatgtgtctgtgttcagggcgccaacccagcagccacccagccacaggacagtcttgtcccagtgtgcatccaaatttttaagcgtgtgccggacgcagaagtaatacagcacgaatccaacgaacgcaccgggcagaaatcgaccgagcgcgattgacacaaggtcataatagctccccatagagggaggatcggacgccatggcgacttggaaccagacaatgaaatatatcatggagtagaatgccggtgccgatgtcacgactaatgacaagatagtagtccagatcaatgtgaaggcgaatagcgaccagcgcgcatcggagcacttgattgggtatgtctcgttcgagtctagggttgacgcttcattactgagtcggaatgacatcgggaagctcgagagaaactcgatactttcaattccgtgctgcgagctggaatagaagtttttctgctcgccggcgcggtgcaagatgccacatccgcccctcgcgtcatcaattagacctgcatgcagtgccgacgcacaaattgaggaatcgccgcggtaagtgccgctgtcatgaccatccacattaaatggcttacctccgacaactaacggtcggtaattgagctcctggtcgccaacaacatacggctctagtagaatcgcggctgcacagccagagggacaacggaacgcgaaggattggtcctcgaatgggcgacaaaggtcaccattcagtccgcaattcgtggaattgctcctagatagatatggtcaggttcgcaagatcggatctgcttggggataacaatagaaacacaccataaacggtggtgacacgacagcttgacgggctgcccataccccggaacttcttggcccgcaacggaagcttttaaagatgcaaagaacacaacaatccaaaagaataaaccaccaaaaaggagcgcgatctttgaacttctgtgtggaaatttttgatcaatcagacgcgccggcgcagcctgtaaacgagggaaccaagggttaatgtgatagacatgcggcggcgtcgggccgcggagccatgcacagaatcccgagggcgtacaagaaaacggcggatcgcgctcgaatttctccgattgagtatccatgtgttcttggggcagaagaggcacgtcgcctacttccaagtcaaagcttatttcatcgttgtcgcgggcttcatccttgtactgcgaccggatctcctgcaagggatactcggtggacgtatccggtgaggatgattgcgcacttgccccggaatactccggtcgcgactgcattttttatatacaaagttgtttgcctgagctctggagctctcagagggaaggaggcgatggaattccttttcagtctcgaactcgtcttggtcaggaatttcttggctttttagtcatccggattgctggcccgatccatggatggatgtcattagattagatctcagatctcatctcggacaagttcacaaaagatattaaaaaattcaatgtatattagtcccttaacctacagatattcttcataacccgcactcttcgaagatgtgacactgctccgtcatctaaaaaccaacaagtccaccgaatcactgaagattaacaatgttccagaatttgacttccttcaaaactatctcaggtagtcatggccggtggcaagttttcgagtccgatttagaccacaagatgttctgcattgaatattccatggtattgcttcaagcaaggctgatgtagcggtaggtttcatgaacccatgccttgttgcccgaagaacataagctctttgtcacaaaggcatgcttcacagcatcaattgtccgctttacacttccgagattccgtgtcttctggatattggccagccgatctagtacaaaacgtctttgttcttcattttccaggccggtgttcccaagcacaaatagaggccataacaaagtagccatatcaggaagtgtggagatcagttcaatcatcgacgatataagacggcttttgcacccttcagataccccacgtctcctccggtcgtcgatgtctagcttatcctcgaggcgttcattaaggtaaagaaaggcagctaaatgtttgacctgtgcaatcctctcgaggtcttctctgcccgtggcatgttgaggaagcgtctgtttcaagccaagaagagctgtgctaatatctaatgacacttttgcatagtattgagtctcggcaggggttaaacgtcggtatttttgtatctatagttatctcgtggtcagcattatactcggatagagcggagcagtcaagcagtacttttgccttttcggaagcatggatcgagatattgtttattaaagtcaaaaggccacgcgagcaccccatcaacatatctatctggcggatagatcagcattgataaatagtaaagtgatgatgaatgcgccgtacctcttcgaggttttcgctgtcagaccacaactccaagatgtcgtcttgatggcaattttcagatgcggtacggctcataatattatgagctacaaagtacattctgaaaaacttccataaatcggatgagccgcgagatgttgtgtggtcgatcagttgcaagccaccatgaagatgtgtcatccacgaaggagagcatccatctgatatctatgtccatgtcagaacgggatatactgcacgcatataggaagacagagacatacgtcgtggaagcacagcatcaagatcgaagctaccgtggcatctgcatgtacaccagcggaaatttcccgtcggagcccttgcagggccatgtgcttatggtgacagacttgctcggcaaattgatcctttcccagaaggcatagctgattcgcagaaactgccagaacggcgtgtcgaagggtgatagagacaaagcataggggaaccagaagggaaatgtaaggattatataattcacttagagagcaagatgggctgataccgcggataaaataatcgagaagataggtctctgtgtccggaaaagaataaagggggtggtagatggaagattggatcgaaaggtccgtacagatgtctatgctgttagggcaaacctgagctgaagaatgtgttcgaggcacatcatcggagtcttgaaagtcaccctcattcaaattcagaaagaacaagcggctagtatactgggttagaggaagtccttggaatacagattccgttttccggttatgtgcggttgtgccgggtcttttcgtccaaaccccttaccaaggagagtcagtaggatatagccagaagaagatggcggcagtaagtaccttcacggccaaagctaatgccccgttggatagcatcctctcgaaacatgattttgagctcccggacgcattcaagatcaagtctctcgcagcgtctacatcgcgggtgctcttcggtgcatttgatgtgttgctctacccatgtcagcgatttaattcctagccatgatgagggttgtacctttgcatttggcgcatccagttcgccttctggtgttttgttttcggcgtggcatagcgtgaaggtggaacgcggacagaggttagatggaaagaaggcgaagcggggacatgactcggaccttttgccgtgacaggcgataagggctagcgccggtagacggggagatgggcaccgccctaaggctccggggaaagttgtgcatctttacttaaggtctgtatttaattccaatccacccctgttcccttttcgtttatgtcttatcgctcttatgtcgaacgggttcttcaagggagttatcgccgggagatatcaatttgcactagaggtttctggccccagaacgggcagatatccttgtcagccagatatgtaccagataatgcctggcactgatcatcatctgagcaccctgatttgctcactgagtgctctctgagtgtacctagggataagcggcctaagtaagctatatcaataaaatgcgacacgctaattacatcacgtgcgaccctttctatttagatcgcctatcaaaaaaggactggcgcagtcaaatataaccgtttatcctagcggtctcgatcctatctaagtgaaaaactcgtagtggggctaaaggccgcagcattcgaggagaatggtaacgcgagttcagtgttcctttggtgggtaggaaatgcaatgtaacaaaggggcagtttcctctgttcagtaagtaaggcagagactttcacgctccccaccgaaactgagtggcttccttacttatgatgaattatgctcacacgctgcgtattgcaacatcgctaacgtcatactggcctaggatcgagcgctttggagttcctactgctgtaatggataagttcttgcctcgcagtgcggctgtactctgacagcggcaactgtaatttatgatgcgagcattgtagcattgagctacttccaaggccgtagcttcttgcgctgcagttgctttggcgatcaagaacggtctgatcagcacagtctggctccgttgaacaatctacattgaaaggcttggtacagaaaagcggtgccacgtaaaggaaaccaggagcaattgcgattgggcacttcatctattgaggggagacataaacttgcgatactagcgccgagcaagatatgactgtattaacgaaaccgtcttattatgtatcacagacatcagtcatatatgatcttagccttgaatccgcccatcttaacgctttgagtattatcctctggtgatcttgtccaattctttctcacacgttctctcacccaatccgaggctgggacatctggatcaacagcggtaccttcattaccatatcccatcttccgtaggtaagggctgtctaaagctctcagcatcagctgttccgccggcctcaagaagtacaatagccccaaacggtcattggatgcttgatcttccggcggtgaaatcacacggtggatgccactcttcaggtaaccattggttagaaactggagtatgtccgctaggttcacagcaataactcccggaggaatccggatgtgctgccagtgggagctttcagtgtgctttatttgcaaggcagccacaggctgttgaaagacaaaagtcatagttccaatatccgtgtggccacgaagatagaggtccttgtagctattattttcctccgaggaacgggcccgatacatcatgtaacgcagagagctgtcgcagtttgcttcgtagagatgcccgttgacgagctcctcttcagggagctcgagggaaatggccagcagtcgaagcagcttgaatgacacgttctcgtgcatgtggcggtggaacttttcaatttctccccagtattcccgaaagatatcgggctgaacccgctgggtctgcgggataaatttgaagatgttgtagaattccacattatcgtatagcccgggtaggatctccagggtccccaagggccgatagccgttgtagtttccttcttcaagaggggcccgatatttcaagcgctcttcctggggtagggcaaaaaatgcctttgcaatagcaaattgctcatcgatttccgcctgcgtgaggccaaaattcgtaatatagaaaaaccctgacgagttagctgatgtccctatttggtaggtcgacgtaataccagagtggtgtgctgctgcccttaactgttccgccaacttctcctttcctcccggtcggtcaaattcggacagatccagcatggcgaggtcggcatattctactgcactgctggtgaatcattattcttctaatggcaggcagtgagtgttacttacactcatgcttcgtttccgggagatggacatattttggcaacccgcttctttcattctgagtcgcaaaagtcgactcttgtgcttttctctccatagttagagaaatcctcaggtgttttaactgttgtcccagatcggagaccgtgtcaatcccctgggttgaaagggttcccttaaataatcgggcttagcttacaaaggcgtgtctttctgtcatagccataggcgaacagcccgagtccggattaagtctggtgcaaaggatgctccctgatcttgggttgcatcctcccctatcccaaaatacgacggttggaattgctaaccgattccttccaggtaaattggctctccttttctcatggcaagggtttcaaagctgcgcttcgctgaggatcctttaggacagcggtaagccatatgtacatatgatatgtgggtacatggctacgttggctgcttaactgcgcttggggcgacagaaacagaactgtcacatagttcgcttcgccgacttgtagagcttctccattagagttccaaaagcactaggttgaccgtatgtactgtagtttatgcgcatgctgaactgtctgttttgccgactgagatatagtttgaccgtgcaatgcctgggcaaggcgaatccttagtcttctgacgatgatgctctaaaaccgtactttttgtcacccagtaatagatgtcagttttctcgactaaccagcttcaggaatcagccagggatgagatctatttacaaatattatactcatacttgcttttctctcccatcgtgcacaggtgctgaaatgaagctcgcgtttgtgactattaagacccaccggctacgaaggttgccggaagggttccgtacaaacgaaaccgctacctccccggtcataaaattcagcgaaactagtatcctaatgcgagggtgtcatttggatcaccagccagccgaaacggtaatggctggtgagcttgtgcgccttgtgcttggcactagctaacaaattccaaaggaggcatgaagtagcaggtgggtcaacttaagcataccaagatttgaaaatttgcttacttgactagacaatcgcctattggttgctttccactgtaagggttggtaatatgcaacaccggtctagacagatacagtatgcagctgttgatcatcctcaaacattctcaaaacaggatggatgtatggattatcttcctgacaccaagctagtattccatccctgcattttgtaaggacatgtctgtccattctttagcacacgttggaatgctgtgcgtgctagctcgatattaagggagggactggagggtgttgtaagaggtcatgggcgttgaacaaattgttaatttttggcttcggtggtcatttatgacaggctaaatataaaatgagattgggttctcagcctcgctatatcgctatacagccttgctttatatgtcgaatgacgaaatttgtcggtggccgctgaaccatggtgagccaacctgcgatatagggcccccgccaagggcgttttagacacgaaagcctgccataccaatacagaaatataatcggtatgtatgtagtgggacagtaaccaagggagtactgtgcagatcaccacctgggtcggcgacaacgcgaacagcagggttgcagtttcaacctcacctccgccacggctgaacatcggtcttaccccctttggattcatggactgaccttaagcgacactacgcatagggctatgtctctgttgataacacacccgtgactggatattggacttaatgacataagctaggtccacatccaaagatgagtattgggtatttgtctgatctgagtccgtgctaacacctgctcagtgagcctcagcctgaccaccctcataaaagcggcggcagatcaaataggaaagccccacacgccagggaaaatccggtacatataggtacttttggaccgttatctttacaccgaatcaccatagtagcttttgtcaaacgcaggccaaaggacatatttcaagattcgtctaactactctcaaacatagccgcctattacgatgaagtgttgtttaatccataaaacatagtcctccgcatattaaacacgagaactcccccgttacgtagtatacttgaatgccttttgttggaagtcagttttatcagcaaaggcatccattaagtccccgtccgctcgatcttcctcagggtcaacgccaactgtagctcggcgattcaagttgtgcgcaatggcccagtagactgccatcagcagaacgcagacgcaatagcaagccagcatggcaacaaaccctcctgtatatgctggtgcttgatttgctcgaaatgtctgcggcccgatgagattccccacggcatagccaatatagagaatggaatactgcacggtcttcttggtattacccgctgtattagcctgagccatggatatccccacaacgtacggaccgaagtatgtatataactttagagaaatgattagtcggttgtacaatgctaagctggaacctggactcaccagatatataccaaccatctgaccacccagattcgttcgcggtaagctgtaaactaggatggcaccaattatagggacacaagatgccaacatggtgaccaggcatcgacggttggtccacttagccgcaatccaagagaagcagaatgctgacagggtcgacatgacaccggtcggcatgttcagcagggaggtaatcacgggcgagaaccctaagttgttgatgatgatgccgctgaaggttgtgagtcctccgttgggaatgttgatagcgatgttgaagaaaaataggacccatgtcttcggatcaatagccgcctccagggcctgatcccacttccagtgccggtttgtgatcccggttttgttctcggccaggcgctggacagcatggtacttctctctatcgttgaggaaaaaggcattcataggagagtccgggaggaagatcaaagcaataatagaccacagtgtcgaaatagagcctatcaacaaagtgagaaaggttaaatgcaaattcatccatgccagacgtaccgatgatcagaaaaaggtattgccaaatagaaagtgctgcactagatggaatatgaccgaccgcccacgagaggaagccgttgacgatagaactcgctgccgcaaataccaaggcattgcgagggggctgctcagactttttatagaacccagcgacgattagggaaattgatggaacgatgatcgcctccaaacaacctaaacaccttatcagtgccattatccaagccggatcatcacaactcacgtacccataaagaatctcaaagccattagtccgctccaattacgagagaccggcatgagaagtgccataattgaccagcctaacgagcatgcagataggtatttggcagagggcagtctgtggaccaggtacgtggatggccacatgccaataatcgcctgccactagattagaaaaaacgcaaccaccgttagagacactacgtactccgagagataagatggatccagcccaagaatattgttggcccacaagctgaaggtcatctttgaggccatatatggctgcagtactgatagcaaccttatcaacagcacccaaggtagcggtcataaagagctaagaacgggttagcttgctcgcgcgcataagaggggacaggcaacataccattggcagaagaatccaatccatcttgcgtaccatcttcttctcttcttccggggacaaaggtgcaaagccagtgctatgagcaaggtactctgctgcctcatccattgctctggagacaccgtgcttctctacttccggtgtctcgacagaaacactgcctttctgctctgccattgtgaaggaactcgaagagcgaacgatgtaattaactcaggaagaaaacggcgaccagcaacaaacagactcaagactgctcttataaagcccaagcaaactttccccgccaacgtcgtgaacctttcgataaaaggtggccagtggggaggccccgttatagatatcggctcttgaggccattggtgaaccgtctggctgataccgtgtcgaccttccccgggagaaaagaaaagagaaaaccaaggaacacaatagagtttgtggggagacccacttagatactccggggtctccaaccttggaaggcgactgggccgtatcgaccttcctcgacaacacgtaggacccgaatgaactttccaactcaactaccgtgacgaccttactctttcgtcaagatgtagcgtcgcaatccacctgcaattataaatttgttccaaatcccagaggaacccaagatgcaggtgcaaaccaattttcattttcttccaatattccaatatgacggttacgaagccgacggtcggaggcgtcaggattgccatcggtacggactttaaaaattctcgcacaaccaaaattctaccaactatagcgctaattatgctctcttagatcgaggaggcacattcactgatgtgtgggcgagtctgccgggaaagcctgacgtcgtcctaaagctgttgtctgttgaccctggtaactacgctgatgcgccaactgagggtaagaaaatatgactctcgtaacggagcactcgagaaagccggctgataagctattacaaaggtatccgacgcgtcctctcgctgtaccaaggacgggaaataccccgtggggttcctcttccgaaagatgacctagaatttattcgaatgggaacaacagtagcgacgaatgccttgcttgaaaggaaaggaaccaaacatgcctttctcgtaacgaagggctttcgcgacttgttgaaaatcggctatcaatcccgaccgcgcctctttgacctaaacatcgttaaacccgatgtcttgtacgccgatgccagggaaattgacgagagagtgacaattgaggggtttgatgaggacttggatggtttgttcaagtcggacaacgagataccaggagtgctcgtgaggggctcgagtggtgacatgatccgcatcttaaagcctctcgatgaagctgctgtgagacaaacactgcgagacctacgatctcaaggctatgatactgttgcagtgtgcttggcacattcctatgttttcccagcccacgaaaaccgaatcgaagaactggctctagaggaaggcttcacccatgtgtcgtgttcgtcttccgtggcagccaagatgatcaagatggtgccccgtggaggctcttcgtcagctgatgcgtaccttacccctgagatcaagaattatcttagcggattctcaaaaggattccaaggtggaaatttggatggtgtgcgttgtgactttatgcagtcagacggtggacttgtaagtcacgaccgtttcagtggtctccggggtatccttagtggacctgcaggtaaggctaaacctacatatgattagagggaactagactgatagcaaacaggcggtgttgtgggttatgcccgcacatcttacgacgatcacacaaagaccccagttgttggttttgacatgggaggaacctcgactgatgtttctcggtacggcggaaatttcgaacatgtcttcgagagtaataccgctggtgttactatccagagtccgcagcttgatatcaacaccgttgccgctggaggtggctccatattgttctggcgaaatggcctattcatagtaggccctgagagtgcttcatcacacccaggccctgcatgttatcgaaaaggagggcctttgacagtaacggacgccaatctattcctaggaagactcattcctcatttctttcctaagatctttggcgagaatgaaaatcagccacttgatgtggagatagtgaagaagaagttcatcgagctgacggatgagatcaaccgtgacactggaaaatcactctctcctgaagaggtcgcctgtggttttcttgatgttgccaacgaagccatgtgccgacccatccgggcgctgactgaaggtaaaggatatgacattggtatgtgcaattcaaacccctttgtggatcttatcctaacgcacaatagcgaatcataatcttgctgtcttcggaggtgcaggtggtcagcatgcttgtgatattgccaaaacactcaagatatccacaatagtcatccacaagctctcaagcatcttgtccgcatacggtaaggcgcttacctttagatggttcatgatgtgtactaacattccaaaggcatggcgctggcagacgttgttcaagaagcacaggagcctgttaatgagagatacaacgagatttctcgtggtcgactggaagaaagactttctaagcttggaaccgttgtccaggaacgattgatgagacaaggcatacgagaaaagagcataacctgtgagatgtatctcaacatgagataccagggcacagaaacctcgatcatggtcctcaaacctgccgacggtgacttcaagaacgagttcaagaagatccatctgcgagagttctccttcgtctttcccgacgaaaaggcaatctatgtcgacgatgtgcgtgtccggggcataggtgcaagtgagagagaagactgggagggagaacaacttggagaacaactgcgtactttgaacttccaacctgcctctccgaagttggtggagcgtatggtaaatactccttggactacccattatttatacccattactcattgctgtaggtccccgtttatttccagaaaacaggatacaagcaaacccccgtgctggtgctcgagagtttggcgcctggtctatcaattaatggacccgctgtgattattgaccagacccaaacactcgttgtggtaccgggtgctgtagccaaggttctccgctcccatgttatcattgacattctttctacttccactgcaactattgagcaaccaactgtggtcgatcacatccagctatctgtttttgggcatcgctttatgagtatcgcggagcagatgggtcgcgctctacagaaaacagcagtttctctaaatatcaaagagcgacttgatttctcttgcgccctatttggacctcaaggtatgcatacattacaattatatgttggaaccaactgacgtgataatcgacaggtgatctggttgccaatgctcctcatgtacctgttcatttaggatccatgagctacgcagtcaagtaccaacatgaactacacaaaggcaagctatcacaaggtgacgtcctggtagccaaccatccggaatctggaggcagtcaccttccagacataaccgtcattactccgatctttgaaaagacaggctcgaccgtggctttctacgttgcctcaagaggccaccatacagacattggcggactgggtggtacgtcaatgccacctaattccaccgagctctggcaagagggagcagctatccggtcctttaaattgatccatgggggagttttcgacgagaaaggaatcaccgacatactcttgagcccaggcgagtacccaggttgtaccgggagtaggcacgtccaagacaacatctcggatctgaaggcgcaggttgctgcaaatcataaaggcatggtcctggtccaggctctcatcgaggaatacaccctccctgtggtccaaatgtacatgggggccatccagtcgaatgcggagctggctgtgcgttcctatctcctcgatacactctccagacttgggccccatctatcagccgtcgaccaaatggacaacggaacgttagttaaacttacggtggatatatccaaagatggctcggcaaccttcgacttcaccggcacaggggtcgaaatgctaagcaacatcaacgcaccgccagcaatcacccactcagccataatctacacacttcgtctccttatcggcaccgacatcccactaaatcaaggctgcttatcgccaatcaatgtgatcatcccgaaagggagtttcctcaacccatcagctgggcccgccgtctgtgctggtaacacgcagacctcgcagcgcgtggtcgatgtgatcctacgcactttccgtgctgctgccgcttcacacgggtgcatgaactgcattgggttcttcggggagggtggcaccaccagcaccggtcagaagctccaaggctacgcgtatgcatttggtgagacaatttgcggcggctctggtgccacggcgacgcaagatggcgcgtcaggtgtgcatacccatatgacaaacacgcgcatcacagacgtggagagccttgagaagcggtatcctgtcattctgcgcgagtttgctatccgtgaagggacaggtggcaaagggtatcatcatggtggaaatggtgtggttcgcgatattgaatgccgggctcccctgagtttcagcgttataacagaacgccgaagtgtgcctccatacggaatggagggcggggatgatggtgagcgtggcgcgaactactgggtgaggaaggtgcagaatgagcatggggccgctgagtggcgctgggttaatatgggatcgaagaatatggtccgcatgcaggcgggagatcgatgtgtggtttatactcccggaggaggtggatggggctttactggggcagctgaggacaccactggcactgggcatgtcgagggccggggccagaatatcttggtcgggtatccaagggcatccgggagtgtgaacgcttatgatactgctcaacaagcatcaaactaaatatcccattagataattacattgagagaagttgtcaaagtctgggatatcagcaaactggcccgtcaggccggttttacatctcgacagtattggttggtgggatacaacgcatcccatttacattccgtgagtgcgtactatttatattttacggaattacaaaagctctacaaaggggttgtatattctataagcctattccagattcttataaattactccggaacattgtcggacaacggccccgcgctaaatctgcgctaaatcgtggcttcatctcgcagctttaagtcgaagcttctagcattttattctgttaggaagttctcgatcaagaaaaccactccttgatctttctcttatccaagcgcacattgtcaatatggtcgaaacctctcctaccctgccgccgctgcgtatcggcacccggcgatccaatctggccgtcgtccaggccgagggcatccgcgatagtctgaaaaggattgccccagaacggtcctatgagattgaaaccctccgaacacttggtgaccgagaccaattgaccgcgctatacgacttcggcgccaagagtctctggacaaccgaattggaggaaaagctcgtatcaggtgaattagatgtcatcgtgcattgcctaaaaggtaaataaaactgattattcttctatttcccctccgcatttgagttaaccggaccagatatgccaaccacacttcctgatacctgcgagctcgcggcaattccgccccgggatgatccccgggacgcactgatcgtgaagtccagcctgccttatacgagtataaaagagcttcccaaaggcgcagtcgtaggcacttcctcagtccggcgttcggctcagctccgccgtctctacccctatcttcgctttgcgaatatccgcggcaatgtggagactcgtctagccaagcttgataacccagccagcgagtatacgtgcatggttatgtctgccgcaggccttgagcgtgttggccgtaagtttcgtatcaaccagtacctgtgctctaaagatgggggcattttccatgccgtcgggcagggtgccctgggcttggagatacgcaagggtgatacgaaaacgcaagaattacttgaccagctggctgatcgcaagtcgactctcgcttgccttgctgaacggtcgctgatgagaaccctcgaaggaggttgcagtgttcctattggggttgagacagagtggatccgatctgatgtcttaaagatcactgcccttgtcgttagtctggacggctctgagagcgttgaagattcccttgaggcgagagtgcagactgtcgacgaagcaacggagctaggaaagaaaatagcggcaagattggtcaaggctggtgcggaagcaattctcaaggacattaacatcaaccgtccacctaaggactgataattgagatgaaatgaggtcaaggtgccaagaaaggcctgcggaattaaattgaagtccatgctggaatacgaaatgtgattggaaggttgacaaagtcagaacctagaaaccaaggaaattatagagggcactgcttgctgagtgcgtatatagtgataaaaccaaactggaggcaaagcacctaataatacaagaaccggtcacttctcgaagtggaagcgtcaccgttagaattgatatatagaaatggccaaatttcactgttcttgctattgctacatggcttaatgaaacttgttactgggagtcctatagtgtaagggagataagttatattgagtacatcgtgatcacagaatgaaggacaactttcataaaaaagtaagcgagacgatggaatgactgaaattgtgcaagtagataaatttgttttcttgttttccatttcctcttctagaaaaggggaatggtcggaatcaatgtggaaaaaaataataatagtttaccgaggatgcattatggggttcctataaagacccgtagagttaggacctgttggtgaaacagacgaaacaggcgaaacggatgaacgaagtgaaccagatgaaccaggagaaacaggagaaacaggctcagactcaggcccaaactcaggcacaggtcgtgggggcaaagcagggggataagggcctggaaccggccggttataagccaaataagtgtcaacaggaggaggagggcgaggccgcaccggaacccgcgagttcatacgagccatactagcggcaggcgggatctggagagcattgacatatggttctggcgcggaatcctcagcgcaggaaatcgtcacagggaatggcacaaccaaatcccagaggaatgactgggcctcgagatggtgcgcaatagcagtggggttcctgtagcgcaagaattcagcaatcagcatattcaaagtgtcagcggtgtaaatgcaggcccaatcaaactcggacatcgggtcctgtccggggcgatcgatcacaaccgtgaaaaatccattaggtacaactcgcacaagctcattggtcggacaatcaatagccatcatctgtccggctcgtttgagctgttccaatgacagatgaagctggtctagtctatcacggagtccgtcctggctcgataagccattgtttaggtcgtcaatgaggtgctggcagagggcttggaatccagtgcgtgcagtctggaagagccgggatgatgtgttatctagcatcactggcatggttcctcaccgatacccgaagccgaagctagcgggattattctgacgagttgtggtaacaatggccggggaagatgaatccctaactcgaaagccagctagggtgggttgtcaaggacggttcaggcgcgatgggatatgtatgatggccggatacagcctatttatattgtctctcagacgctctttccaacatgaggctatcattgtgaataataagaaaaagggaaccaaggtcaacaaggaagataacaaaggttagaaaggaaacacatcgaacaaggagatcaggataatgcccttgttgaggttctttgttactgagccggctatcggaaccttggagtatcggaaagtactaggcaagagtgcaacaaaacgtcggaggactatcaaggcagtatataactacctatagctgtggacaaaattacaacataagcctttctagccatagacaatgatgtccaaataaattatatgtatcgagaatagactccgaaggtagtgactttacagcaaaatcaatcaaagtgcaaaacaaagcaacattattcctccaagggtatcagcgtaagtcgtaatttcttgacatccaaatcatgaggagaaacacgacaggaaaacaaggcgagcaaacaagaaagcaacgtcgttagagactaacgtcactggtactgtgctgagcacgacgcacaatggtagtgcacagacttggccgtgaacaaagtacagctattgatgtctgcttgcggatctgaccccattatctagacggcggaacgaccccagcggcggcgactgttcagtatgtcagtatcaatcaatcaaagccatgttataaggtgcacattggcaacttacgttccatcagagttgttattgcggacacggaaggtgaaccaaatgccctgaagactcattagtacttggtcatacgtatcggacattctcatcacataccacgatagctgaaacaagccagacaatagcggaaaggaagctaaaggcctcagcagccttccaccggccacacgtctggtctcctctaaagtgccaggaccagatgctgccacatggcaagtggcggatggtgtcgacgaggacaccgaacgcagcgaaccaagcaaacgaaatgaggatgtccactagactccagtaagcattgctccatattcaccagatagtatatcaagcacatactaggccaggagaagaatccggacgagaatgggattagccatataaggcccagcaatatcgataagccggcgattacttcagtatagatccatcgcgactggggccaccagttgacatctgcgccgctgttgttgacctcggcaaggtagtgtccgatgacacctgcgacaacctagacaagagttagatgtggtttatagttggcgtagactgggaggtatttacagctgcaaaggcgatctccgcaacgcggaggatgatagaggcaaggcgcgaaatgacgggcattgttaaggtattttcaaatcaatgagccgtttgatagaaccgagagatgtgaatgtataaggagataatatgtgacggtcgagaaggtgtagcgtggaggagaggtatgggctggggaacacgagaagctatataacgtgtgaagtcgcacaggcaagcaaactgcgagagggagcgacagtgtattttaagcaagggacgaacgtgaaaatccaataaacagaaagaaagaaaaaagaattcaactaaaaagaacctaaaaacaaagcacggcttgcattaggcacgaccaatagagtcgatctaagcctcctagtgtcgtcagatcagttccatatagagcagttcctttccaacaagccaaggtcactattggtccaagtgtactccgtaccgtgaacaaaaacgtgcccaaccgttttccacttttcgtggcggactgaccgctgatgtggactgtggctgaatgctcatcaacacccgatcggagcaaggagtgggcctggaatagaggcgtacaggtactgcatagccctggaagtattcgaatagtacagagtacggagtactgctgcctccgtatcatccctgccttccccagacccagcctcccatgctttaaaaatatccttggcgttgagtacgggctctgtgctggatgatatacgtggcttgcttttcgagtgccgatcccgtcgactattggcgatagctctgatttgaaccagaattgggttgtctctttgtctccacccagggcgatcatttgttgctgtctgacaggtgcatgctgtttttccaggcatacaacatgcgaaataccgacaggggagatccggtttgaagcgaagagtacttgacacatctgacaacacttgacatcatgtttaacctgtcaactgactgctctcctccatccctgtctgtcagccctatgacgtgggggccacggagggactcgaatttgtgtagttttggccttacgatctcttataaggattatgtatgattcattctgcattgggttggttataaagttatttctaaaattactacatatgttgtagtagtatttcatgttgacaagtggagaatagccgaactacctaggtaggcagcatagcaaaacatcgaaatgtacatgtaggaagagcctagaaacatgcaggcgatgtgaagtgtacattttgagctaatagtgggccgttgatactatgaatagccagagtagcaagggccagaagaatgaggcacatccactttggaaaggccaagaggggaaggctaaattcgaaataatgctgcctacatacaacatccccaaaaataaaataaaatgacatatacacaatcacctcccatccgcaacatctaatacaaagtaaagtatcaactattacaatattttcacaggaatactaagtattcttccgatccaagtgccatgccatcacatcgcggaatatccccttggaaccagtctcgatagtatcgccatggcagggaatcaaacgatcaaagtcccactgatcaatccttctcatagacatattaaacgctgtccgatcctgtgccgagagaatataccacgcaaaccgtctctgccatgtagccgggggcttggtggacatcagcggcagaagaagctttgtgaggaaattagtccctgatgcttcagggctcttggaatactgctccttagcaggcaggttgaagagcagatccgcctcgatgaccgtgcgcgtgggcttatggagaaacaccagctcgcacgatccgtggccatatacatattcactctcaaactcggtatcgaactccttggagatcgaccgcggcagttgatcttccttcttgaatacgtgttcgaacggggtgtcctgatactccgggttcgattgccgcttctcgtagagaccctccggggctagaatctctgcttgcgggtacgcgttcttccatggggtaaggttgaggtggtgttcgagatctggcgccgcgatgtatttgacatttccgccgagcgactcgactgtctcgcgaacttcgggcgttaggccgacgggcgagaatactgcgagggaaccggtggcaagcttgactgtcgtacgcaaggagggttagcactgaatcttaatcaactgaagagtccccatgggcttgacaggactatgcgccttgtaggtgggttctgcaagggtcggcaactcacccagcgtccctcgcccgccaaactgcaggtgtccgaaccgtgcgaagggcagactcatggtcacaatttctggcgtcacatggcgaattaccatggtcgcggaagggttggctggaaagagctgtggcatgttggcgccttttgctttttccttgtgatttttgagttcgagagctgtaaggcgttggatgtctcagttgatgtgtcttcgacagatgtattttagagcccgcgcactaacagaccaaagaaatgtttcgattgtaaaatagtaaatgattgaagagcagctctcgaggtttaataaatgtcttacctcttagggaagcaagtggccagacttgggatgacgtatgacatgcttatctctccagggctccactttggatcgaggctgaccggatttgtcatcttgggacacccgtggacctcaggaattcctgggctgtactttaccctagaaaatatccacgaacgacaggaactacagaaagacggaataagagagtcagtcttacacatcctcggtattctcgagggggacgctcgacttttagatgggcgattttccccacatctatcttagaggcataagccaggggatggcaactgctttgtggacattcttagctgcaaccgcgacgggccggatccaagtcccactaggtggtctactaggcttttatggttagttgccattcgcgcagcagctagagcggttactatccggtctatccctttttcctagcagcgctcagtcacagagtctaatatccgggttctactttgataaaattgctgagatatcgcgctccgatcagcctgttcataattctgttttatctacgcctatgtttctaagtcatggatcagatgatccatgggtacctgtggagctgggacgacaggcatgtcaagtttcgcggaggcttatagtacgtgtcgactggcaggagttcactagcgcagagggtgacggctattgggttaaggaacctgaggggtttgaccatattctgaagttcctcgaaggttgatttgacgagacacgctgccagtgggccgtctatggctatacctatatacgtatatgcgtatgtagacctggaaggaaggcgccaagttaccgtcaaaaggccattcccaggccattccagaatatcaaatacctatacaggtaaaacagaagtgtaaggctaggaaggtgcatcccacaagatgatttgttttgcatgtcacgagataaaggacaaataggaaagtacgggatgtttcattctaggaaggtgcgtctgttgggaatataacccccccctttcaattccccaatctttcctcttcaactcttctcccagggttcctctctgggtgactggtgaagctccaaatgacatacctaggtacctaggtagataagtagcgtatcattgtataatcacattgaaatggatgtctactctagttcctggtagctctttgtcttctcagcatcctgggaaaggaacatgcattgaaggcaggaaaaacgttgagtgatgagggggaaaaaatttataaaaaattatggtgattcacaatgacaatgacgcccctagattttgcagatggaaatcgagagtagatgcctgcaacggaacagaaggcgatgcgccatggcgccgagatcggtaaaagaaaggtgcaacaatagcggattaaatggctgggaaggagacggagaaataggaaatggcgtgaagtaggtcattgaagcttaagatagtacattaatgcaaggaatgatcccgttgaaaatttatccatatcggccgacgggaacgtcgtggcgatgaagatccttggaccattccggtgcaaccttatcccgctcatagagcaggccacagttatggcagagtgtctagacatgatggttagaaacagttggtcacacattctagagtgaccacttacccgtgggccatctggaccatcgcgcacagcccaaactgctgtgccccacaccgcacagttcttgcatctccagctttggcgttccctgtaggcacaattcattagtgaatattccagtgagatgtagatatgcctagcagccacataccattcggaaagcgtcccaccgccgccaccgtacccagcccctgatccggtatcaggagttccccggccaccaggagtgccacttctgcctgtaggactcaagctccggaatcggcgcttgcgcttattcctttctccacgtccgagcggagtctcactatctacctcgaagtaattgccactggtctgccttgagacctcaggtgtgattcccgtagtagaagagaacctagctgtttctcggcgcagacgtcggatctgacgctcacggtcaccttctctccgctcgatttcttcctttgacagtgtctcgacctgaggttgccactcatcgcaaatggtttcagggtcgtaacgccagccagcctccacgccgttggctgccaaattctcgatttcgttgccgtagccggtgaggccgctgacaagagcaccgctttcgcagacttcctttttgaacttcaagactgcctcgtatatggcatgtgcaatcgcactaacccattcaccaccaaggctgagatctgcgcaagtgatacgcgcaaactcttcagccattccgggtgggtgtagtagagaccactcgaatttgtctgtgtaaagcttgttttgcaggttgatgttgagggtgatcaagcaccgatatgcgtcatctgggttcaaaaggctgtcgtttaccagcgcttccttggtcactgtcacagtggacgtcacatcgggccggttatcaggtgtcccaatgttggcggcagctggtgtcgtcgacgtgtctcttgacggttcagtctgtggcggagcactgggcagagtacctgcatctgtactctggaagagtggatggagagcaacgccagcgtattcctccagctgttgccggatctggttgctgatggtcatggtcgtggcttggggatttgggagatcaagatcgcggacgaatccaatagcaaattcttcgggcgtggagagtgattcgtggaggttccataagaaggtatccttaatacggaacgggggtaatgggtcaggtctgcgatacgcaggaagagtctgattgatgctagggtccacgactgtgcgtgggaaagggaatggctcaaggggttgatgagcggggacttcgacgtcaattcggataggaacgagtgtcaaggggagttgcgcttgaatctgcagttgatcggcacacctagaatcaccacgctgtatgttagccagatttaaggatagacagggaaaacagaggccgctctcgttaatggccacatcagtccagacaatagggaacatacgctggtcgcagcattctcttgatcatccactcgcgaaagaggccttgcacctccaccggcgcatgcacttctttgcccagcttctctgagtagggcaccaacttgtcggtagcggattcttcacgccgaagactcctcagtcccgtcggccgccggggcccatcggtctcatcaaaatcctcgtcatcaaaaccatcttctgcgtaattgatggctgtggtaccacgcttcgtggtgcgcggagtcgggccggtctgtgacggaggattgacaggtgtgagcaacgcgtttccatactggcgcatgcgcgggggataggaactgatatagcctcggagaggggacatgttggcgactcaattgcacaataacatgccccttcgaggtatgggcgggagaagagagagcttgcgattgttttgatccgctcgatgttcgaagggctgatcactgcagtgaggcacaattgagaatggcccaagcgcgaaaagtttaacaacgagtacttgtaagatgccacagcataaagtaaatgtgtgacaaaaatcaagatcgcgtcaaaggcatccagatatgatccagttggagagattggctctgagatcgatattctgcgcgactttgcccaatccgacgctagtcccattccaaggagggcatcatgtgatttgtgcctcaggccagcacgactggaaaccatcatagtaagacaacgcagacatcaatgggcgtatcaatgaacaataaaagtcatcaatacccactggcctttcctcatttctcttaagccatagctacatatgtacgtattggataagggctcattgtggtatgaaaacagactcaaatccaaaacaagcaaacggaatgtgaggggaaggctacaatttccaactagacctgcactatatattcaatctccacagccaacctaactgattcacaagaaaagaaatttaccaatcagactagaaaatggatacaccgaaaggaaggagaacacccaaactgctgagtacgccagcgctgttgtcggtaagatgaaaggttgaatatttgttgcagacatatttagatgcaactttaggaaaaaaataacagtcgaaacttcgaggcacaaggccgggggaatgataatcgcacatgcaagggaaagaagaaaagaggaaaaacaaaaaaaaaaaatagaaatcagcggagcccaataacactctgcgatgggattagctataaagcgttttaagtgaggattggggccttaccatctccaaagtccacacacgccggatccagacctttactggcccctcgacgccctcgacgtcgtgcagctcaatgccctcccaccagcagcggcgggcaggtttgcgccaaaacaggagaagcttctgggccatgcccacggaattgttgtttgacaggtctccgcggatatcggtgcggagtttggccagtgcaagactgcagattactgccttgttaggctccggggcacggtggccccactggtcagcacgatcaaatcctctacattgtatattagcattggcccacgattgtaatatcgagttcaactcacccggctgtcagcatttcaataagatgctgttcggttgatccaatctcctcgctcttgcggagtccagaaaagatgccgttctgtttcaacaacgacctacccgccccccgcttgacgtcaagcatttcatcgtgcccaatgtcggcgcgagggggaatgacatagaagtcgagatcctctcggaggacaatgatgccagcacggtcctggagcatgtcacgggctgatccctgcatgggatccgacatttccatgtctggtgagtttgagccggaaggcagagatgtggggatggtttgggcaacagttcggaagaaatccagcatgtactgaagtgagaccggatcatactagataatatctgtcagaaagaatctgatactcaagatagagatttgcgtacgtcaaccgggaatacatccccgtcatggaaaccatttgtggcatgtccatctgggaggaggccattggggaaaagagagagcagaacgaattcaggcaaagtcaacagctcatctcgtgaaagggtgaaccgcgtaccactatcaacttgttagactatgcataattgagatatgaatgaagcgcgatcctaccgaagatcaagaccgacgtgttcatctccaccgatgtctattataacatgttagcgaaaagcacacaaagcatatttgattgtcaaacacaccaccaagagtgttaattggcggccccccagtctgctgaacctgggttatgatactggaggcgcctcctgcagcagccatcacgtaggtgaatgactcaagtggactatagccttctgtgtatggcggtggtggttcaccgtcgtcggacgagccttcgttttttggttcagtgaaagacgcttttgtgtcagcaactgccgaagatggggccggctcgagcgactcctcgacaggcgctggaggcgctaaggctggaggacaagctggtccaggttcagtaactttatatgggcgattggtgtccggaagtgatgagaagacaagagatgaaaacggcggaggatatgcgggtgaggaactcgacgctgatgctggggagtgcggtgggggtgcagtgtaataatcgtcgtcctcctctagggagtccgttgaatgaggcggacacgccgtggttgaagggtccgacggcggcgtttctcgcgacaccgtggtttctattatcgcctgaatcacgtcagacaggctgatttgggcaagcaaaaatgataaaatgctgactttagtctagcaatgcgactgatctgggtcgagtctcgtccaagtcgctgtgttcaagagtcttggcaactttccaattcaatgactgactttcagcaccaggatgaaagaatctttgtctccaaaatgagtaaaagagatatacgcttcatctgctagattcgcagtgattgagtgttagagaaagagagcgcttaagaggttggggaagacgggtagatcaacttgggacggcggtaagtccgagcgcctcactagccatcgagacattggcacgtgccgtgtcctctgtgatttcgtgttagtttgttttgattttagttttaaactgtgggtttcctcttcctagaggccattattattgtgggatgaatttagacgtgtctacagcgtagtgaagtcatggtaaccttaggtatgcccatgcttagacctatttccagccggtcccccgcaaaaccgcctcctattgatctctcatttcatgccatccattgatgactgtgaccatcttttggtttttgttcctaacgttggaagaattcaagagtattgtacgtataggaaccattttcttttttagtttttctggaatactcgttgtcaaactcgaagatcatcttcatagtctgtataaccttggaatatacctacctacatacctatgtacgccacatagataatcttaaaaccaagtctcggatatttactatgaggatcacaaggaaaacaaaaagaatcaagtgtgacttggtatgactagtttggtgtggaataggggtagtcacatctaggcaatgacaacgaaagtcatcgtccagacgcccctgagaagagataaaagagataaaaagggagggtatttatgtgtatatgtaacgacttccatgggagagagatacgcgctatatgtgcatttcatttgtgtacttcaatatttagatatttttaagtaagtcgtgtcagacgttacgctctgcgaagctctgaatcagaccctcgagagtcggttcatactctttcaagctgacctggtcacactcaagaatggtattggcctgtacaaagaccttacgtgggaccttgttcttcagaacaacctcacgaacggtggttccccaccagctgtcgacagaggtaatatcgtcgtacaagcccttaccagcctcaacatctgcggtattcttgtacacatgcagcttctggaggtacttctccacggcaggacgtccgtgagtcaaaatcttggaccggtcaagatgaatctccagatcagagagatcctccttgctgtaagacaacttgacgaagtcatcaccggcatcgaggaaggtgcgcagaatactataccgagcctgcatgtgtgcctggccccatttctgggtcttcggatcccagaactcgagggcgaccaaacctgcgcgagccatggagaggtaggctacgtacaggacgtcgccggcctcgccggccaagtcttccttgccatcaccgaatccaaagatcttcaggatgccaaagtcgcagccaagaaccatggccacgcactcagcacggcactcctcatatgacgaagcaattgaaccgaataccgagctccatgtctgtccaggcttgtaccaggtcgacacgggcttgttggtgacggggctgatgggtgggttctcaatgtcgaagttgtacttccctggcgctgtctcctgcagcagcttaccagttccatgacccagcaactcgtggatgccgacctggacctcaaaggccgggtcgcggaatgcgcggaagacttcctggtctctctcagcgacgaaaggaatagcctcgttaggagccttggcgctgagaacgttgcccagggacacattcttgaagccaaggttctggcgaatgtcatcataattaggcaggtttatgccagctgggagacccgagcaggcgaaactcaagacctccaatgaagtgaagtcggggctgaggaacttgtccttctcaaagtccgtaccccagggcagcttgggaatcatgctctcggcactgtcaaccagcgtcccgaaagctctggtgcgctccagattgacctaaaaatgttagagacagcagtagatataaactcgtcacgtgtcataccaaagcaacgaagccttcccattctccgcgcacaccatgggggtctctgtatgtttcaacaaatcccaggtttgtctccaggactggcttttggtccttaacccagatgcgctggctctccttgaaagcctcgattgaaccagctccaaatgaaagagcatatgagtccaacatcttcttctggttttcatttgctgcagcaagtcccgcctgcttaatgctgtgcgcgatctttgccatctcttcctgatggtcaccgaagacaagacgcagcgtctttcccttcaggtctccgtcaagctcgaatgcgaccgcatcgccgaggtcccggtccttcacaggaggcgaagaaacaccagatgcgatcaaaagctcgaaatcacccgaggatgtcttccggattctagtgttctccaacgcaagtcccttcttctccatcaagtcaccaattgctgtgatttcctcctgtgagattgtcggggaatcggggtagtaggtggtcatgtgcccgtgcttgggatatccgaggtgcatcatcgactcttcactggtctcgtatatccctcctccagtggtgctagccttctggaaagccgccttcgtctccgcagtagccgatgacagagcttcgaatgcagatgcggacagccgaggaatgaacttcgagtctccaaagcccttgtaatttccgcagttgcctaagaattgacccgcatattcaaggaagaaacggagatcatcggagctgacttgtgtcttctgggcgaggctgttccagtcgccattggaagcatggtacagtgataggatgaggtcgtagatgggttcggactcgggggaaacctggcgcagggtgactcgagtgccctcaaatgcggctctgtatacattccagaaaagttagctgccaagagctcttagaaggcgtggtattggcgggtgtatcgcaggaacaccgtacctgctcatgaagtgcgcatatttcctcaagttttggtctttgagggtatcgaagtgtgacttgacttccagtctcaccacggtaggaggggagtcagctaagtaatgctgtttgatgctttcgtccatggcggcgcgggttagatgagaatacgaggagaatgtgtttgccagtcggggagtcggtaggcgcgagattcgatggaggggtaacaaaggtaacacggatctccgcgcaatgccacgcatagagtgcatacggaggggcttcacgacgaagtatgacatatcatgaagaggcaccaatcaggtacgtgtttcctttgccacggtcggatcaccaatggagttccgatctacatttgcttggcaccgttttgatttgctacctaggtaattgattgttctcgttgtcactttgcttaattacaactgttgcagtgactatttactataccgagaatgtgcaataatagaaatatgtagcaataacaggaaataagaaggggtatcagctgaaaataacaagaattgtccttatatcagactctcatacttgtccaatccttgcttttgggttccctgttgcggtgtcgcagctgtgccttggaaagatgttaatctgttggctgtgttcatcggaggtggtctcatagtgctattggtcaccatgtttcctgcaggaggagggggaatcgagaatgaggagtagttgggtgccggttgcgccgttggcccggacgtatgattcgagggtgtcatagtcggcatggaccccaaagactgacccggtgggccggtgtgggatcgaagattaggattcgctggggctccccaggtagaagatgagggttgcatagtagggaagacttgagtaactggtgaagcttgccgagcaggagtaagagtcgggaaagagcccagtttctgatctggagtgatggaacggaagccaatattggactgctggtttaaggcattcgcttggtgtgccgtgcctgcattggttgaagaccaagagaatgaaggtgacatgctcggaaccactggtgtggctggcttggctggctccatactaccccacatatctataccctggtcattcgcaggagatgccttcttcccaagaacaaggcgctcgaaactgccagcaccgccgtccgcatcgggcgaactgaggcctgtggcggactgcgaaaattcgtcggcgccattctggaaaccggatggtccagcgccagaggatagctcttgcagctttttgctttgttcctgttcaatcctcgttgaaagagtttttatcagagccataaaggcattgaactgtttaaggctcaacaaaggcccgagactgaaactccagaggaccggcagaacttccaaagccaggaattcggagtctgcgacggttccaacttgacgaaacaccttcaacgatgccatcatcaccgacggctctttggtcttgatcgccttgagagacgggacgagcttttcttgaatagtatacttgtccaatatcgaggttttggctggttttggcttagtcgcctggattccagacaaatcatcgtcaagcccgtctgaaacttctgcagaggcaccgcaaagcacactaaaagcttccagactacgaaccttgatagcaaggctgctagtgcggctaaaagtagcagcaatgggagggaatacttcattcttgactgtactaaagtcaagaactgggagcatcacagggaggcatttgagggaagcatccaccaaagagtgagtgggcgaatccagcccgagacgaatcaggggtagaatatctaaaaaagaaatgtcagatgtaggcctaaaggtttccattgacgaaacccaccatctttaaactccatccctgaacaattatcagcaatcaaccgcatgttatcaagcacgaccatgagaccggcatctttctttgagtctcgttcagcaggccctttgcccgaaccagttccaaagacttccttcagacgagggatgattttctctgggagtacacggcgtccgttgggaatccgctgaagaataccaaacacattttgcaatatcagcgcaagcagttcccgatccttcaattcgtccatcaacgcccccaatagctttctctccaagacagaaacagggaaatcaggtagtacccgttgtaagccacgcaggaattgagacttctcattgggattctttgctggcaaggattccagaaaccgaatagtggaaaccaacacgttgtcaaagtactgtgattgctggaactctcgagcattcatgcgttgggcaggccttctcgtaataagccttggtaggacatgggacactagatccttgggaatcggcttcgagcagaggaaattattgttctgcgacggagtggaagacggagagctcagcagtttcttatatgtggacaagcttgcgttcgtttgtagaggagaggcatgcggagagttgtacagagcgatgatgacgagacccaaagaaaagagatcggcagccgacgatacattggagtccagcgcaaagtctggcgacgtgtagtcaaggctcaattgtactgaagcgggaagccttggttcttgatagagaacctcagacacagccaatggcggcagcgatgaacgactttcagaagaatctggaggccccgcaaatcccagaccagagatcttccaatctgatttggcattgatatagatggcctccgggttcagatttccatgcactaagcccgcagactcgtggagaaattcaagacccttagcaacttgcaaaagtcccttttggatttccaactcatcaatctccatatctcttcttctccgagtcccatcagcctcttcaaccacataccggctgcttcgcgaaccagcgcgtgtagtattctcttggtcgtctttttctagcagcagcccggaaagcgaggcggtgatatgttccgtggcaaacatgagaccaccattacgcgtttcctccacaggctcgagcacctgaagaatggatgggtgccgtaggcgcgcgagattgcttgcttcgcgcttaagtcgctcgatcacgtcgtcttgtagcttcttgggggaggacccagaacttctcccaaatccactagagcgtgtctctagagacttgcggtcaaagataaacaccgacgccgccgttcccgtggactttttctttgcatcgtggattttccaggggccggagtacacggtggggttaggtgagatttggtaattggcagaaatattggagctgaaagacttgagcgcagatgagaacatggtgaatgatgccgcagacgagaatcggttggcacgatagtaggcggaatgaagggagtcgttcgtttcacagtgtcgtcacagtgtagccagcacaagacatgtttattttcaacaacacagtggaatttagagagtatcaacgggaggtgagtcgaggttggagtttggtggctaacaaagtcagaagcattagctcaaaggcttaaaaaaattattatccgcgggttgcatacttggtcaataatcccgcgcaacacgacctcaggttgatcttcgataacaacactcttcgtatcggaccatcacgtgattgtatcaatatgtacactggtgcctcaggcattaagattttcatcgccgacgcaacaggcttgaactctcaatagaacgcgatagtcaaatccaaaaaagacatttcgtgccatcttgaatataattaaccttgaatcgaatggatcagatctctgaagtcttacgatggcgcagatcaatccccatacctagtgcctgtgccacaaccttccggtattacgcttagagagcttctagacgtcctcctgtggaactacctaggtacccttctcagtccatatagatcgaggtctgctatgaactcttggcaggtgcctcaggccttcagccctactgaaagctcaggcaaccgatacaaaccgcatggagccgaatggagccgaagtcggcggtacaactccgatttgcagtcgctgattggccaaaacggcaactccattctttatcaggagggcggtggcagaacttcacatctggggcttccgagtcatcggagttgttgtcgagctccgcagagatattacagttctagtgcggagtcatctttctggttgtgatataaatccccgttgacctcgtcgatctcagtacgtttatacttgttccagtgactcaattgacactctctccactctatgcccctggctggccctttggattattcctaacaccaccacagtcatgaagtcgctccaccaattggctcgccgacaggtactgaccgggcttgcaatgccccgcgtcctctcctcacaggatactgccaccagccgggcatggcggagagctttcagcgcctccacggcagctgcctcccagctcccaggtcttgacgcttcgaaattaactatcaccaagaccaccacaccgaaggagcctatggactccaaggatcttgtctttggcaagtacttcacaggtaagggaatttctgcgctttgttgcctttcgggcactgactggaagcgattgtagatcatatgctctccgtggaatggacggctaccgacggatggcacgcacctcgcattgtcccctaccagaacctcagcttggatcctgccacctgtgttttccactatgcgttcgaatgtttcgaaggcatgaaggcgtacaaggacagcaccggcagcatccgtctgttccgccccaacaagaacatggaacgtctaaataagtcttctgcgcgcattgctcttcctacagtggacggcgatgcactgacaaagattattggagaatttgtgaagctcgatagtcggttcatcccagagtgagtatatcttgcgtacatcaaatggacatccttgctcacctccatagtgctcgcggttactccttgtacctgcggcctaccatgattggtactcagaagaccctgggagttggccccccaggatccgccctcctgtatgtcattgccagtcccgtgggtccttactacccaactggcttcaaggccatctccctggaggccactgactacgccgtccgcgcctggcccggcggtgttggtgacaagaagctcggagccaactatgccccctgtattctgcctcagctcgaggccgcatcccgtggtttccagcagaacctgtggctcttcggcgaggaagaatatgttaccgaggtcggcactatgaacctcttcattgctttaaagaacaaggagaccggacagaaggagcttatcactgctcctcttgacggtaccatcttggagggcgtcactcgtgactccgttctgactctcgcccgtgagagactcggcccccagggctggaacatctccgagcgcaagattcgcatgtccgaagttgccgaggcgtccgaggagggccgcctaatcgaagttttcggtgctggcactgctgccatcgtcagtcctgttcgtaacatcagttacagaggtaagatggttgagtgtggtttgaaggaggatgaggaggctggtgagattgctcttcagatgaagaactggatcgagcgtatccaatacggtgacgagaagaacccttggaggtaagttggcatcaatctttctttcttttttttttctcttttttttaacctggatgacgatatactaacaacctgtcagtgttgtgatctaggacagacatgtcagataaagggcttctgtgcccagactttgtgtggccgcagaggctttaaaaagtccttgctcaggcgatattttcttggtcagttttgcattttgcatgttgtttggatatttgaggtaccgaagctaccaaacagcagcgggagtcttttacatattcaactggagcttggtgctttatataggaaaatttcctttgctattttcagtctttcgttgaatccacaatctcgtagagatatagtgtatactccgagtgacacatgctgtgggattgacacgccccaattgctgaggggggaaatataacctcgtcaagtcagtataactgcactggttcatcctaagtcgtagtatagcaacacacgacggggtttgcagtcgggctttgcagaggctattcgaacattgcgtcattgggatgtcccttgtatatcaattgagaaaaacgcttgcagtaacaagccccttttttgagggtagtaaaaatgaaacggctccagggcgacggattgctcgctgatcacgatttcccggctttatggtagactcctatgttcccatcacccaaggcatgattcaacttcattagaggtatttttgatggggtgtttggttctatcatcgcggatataaaacagtttttagtgacgtggagtactcggcacataatcacaatatgggtgccattgtagcgtactagccgctgcatgattttcaatgggttcagaccttggcaaagatatgccaagctatgtatttgatcgtaggccatgaaatgtagttatatatcagtgcggaacttccaaggttgttcgtataacacgatgactcatatcagatttaccgagagaggggaagaagaaccaatacagcatttgtttatagatacagtgaaagtaagaatcatcaaattgtagcaaaagaagaggccttatgccatctaccacataccatactaagacaaatatgacccgctcgatcgacagagtttggccgttgatccgctagaggtattagattgacaacagtctagatataatatcgtagtctgtttggttgacatatcgtcaattcttcgcacatctaggtacgtcctcacagattacggttactacttggcaggctttgatacttttgatattcagtgtttcatttacataaatatcgttcaagagatagactattcggggggcgaagtaagaaaagtcatgtgcctctggcttcatacaggacgctgattgccagaactggtagccaaagccacggtgatcaaaatctaaacggtgaagaacggtacttttcatgaaaacagtccttttttttcccccgagacaggtaactctatctatgccattgttcagagaaatctttaccctagatcattcttgcagggacggatataaccttcattcaatggcaaccgacagatttagcaccaagcatagatggtgctgccaacccacaaaacgcattacctctaagcacatggatgaaaattcggacaggttagttagactccggcttgaccttgtatgaacacagtgctgacgattgtcagccacccgttgccataaccctgcctgtttctacgaaattccatgtttcccccatatgctacctgagggtaaaccctagagttaggacgtacaagccaatctcctcgcaagggctaaaagacccaatcaatgtctcgaattgatagttcgggtggatgaatcacatcattacggagtacagcctagactaacggcagatattcggctgcgccttgaccgaaaacaaggtaaaataggcgacatgcagcacgtggaccacgtgggatgaggcgaaacccagacgcggcgagtcaatcgagggggaaagcaaaatgaaataacagacgggcttcctctgtactagagaaggtttcaggctcagtccgtacgccctctggctacagattgggcaaaaattgtaatcgcagcgggacacaacaggcgtttcaggatgttccgcatggataacaatgggggttgttcgatctcataggctaaatttagtgctcggcttattagggatattgcaattaaggcttttatgaattctattgtatcgggaaataaccggacttggtgggagggccgtgtggcctgggaactggccagcttcttatcttgggatacccacggcgagagtttataattattctcttccggacttattgttgacctgtataggacaaacatagtaaaatgcaaacttggataagttaagtgaatggtttgtggtgtgactcgagcacttagaagaaagcaacaacctggacattctaaccatgctcggtttgcagccatcgactcccattcggagattgtgtttgatcgcatccagctttagcactggacgccttgtccgacgtgcctaggaagaattcatttggagcaaaataggatgaagatggccagcaggtgcactacgatggactttcgcactcggtccatttcacgtttagtgtaacaatccaaagcgagaacaacgtgccagcacgacgcaagaggctcggagattgccgtcattgatattcctcgagtgacaccagactcccaaaaaaataaaaaaaagaataaaaaaggaaaaagagagtaaagcacaatgggggaaaagacgaggcattccgcagatatgcgtgtgccatgggaggtgcatctcggacacagcaaggtcgggggctgcatgatagtccaccgccagatacattcttctagattgttattagaaggctcaaaatgcaacccatccaagcatccggggacgagaatggtatgtgagtggctataatccctgcaggagcaagagtttccactaggatggctgtgcaattcttaaaattccaactggagacatggacagcattagcggtgaagtcaactatgtaccgggtacctgagctgttgtgctcattgagcgtgtcactgaggtcatgggatgcctctccgacattactcgatcaggaataagaaggtgtccagctcagccctatatagggagataatcaccactttcgggcgacgcactagccaagtaatacgcactgcattcctgttattaactcccggattggtggagagacctattcatagcctcgtttgtcttacctgaaaagagcctcttttttttggggatttccctctaaacccccttgtccggactatgatgtacttcgtatttctgccaagcatccgtgtctgagcgtatctccggctagacagtcgtcaatacaatacctccatacctctgtaggcaaacagtgggccttaattcctaagtacggagacggagtacggagagtacggatttagtgcgcatcatatgcctccattgggtattctcgatgccgccaatcaggcaaccagtggtagcgcgtcaatgagatcatattacaggaagataataatggttataataattaaaaaagagaaaaagaaaaaaagaaaacaaaacaaagacagccaaaaaaagcaaagtgatattaattatagagtcactgaaggaaagtggctctattccagtacaggcatagggatgaataaatgtatacgaacgaaccaattgtaggttagagagtatttgtaggcaatacaggccctacttttccagggcacctagacttcccagagacaaactgcttttgtttttttggtttttttttcccctagttctctcatttcaaggttgtctatagtcttggatatcactccaaaactctccaataatctactgccagaataatcctcaagatcagccaaagagtcagatctttatccccttagtccgttgccaagatgaagtcaaaaaaaccaaaaaagaaaccagcaaaaaaaaaaggaaaaaagaaacgtggtaaccgtgcacattgaagcaacccacgtgagaatataaatatatagaagaaaaagtaaaacgcaaggtgtagccccaaagtccatcccgtttcatccctggacatatcgtgtctcgggccagtcaggtcgaatgaggatcaccctccaagcgaacgtctgcttagcgtgtcccggcctaaatccaataatccatcctaccgtcttggattttgatcatacgccgtaccactttggtgctacatgttagatctgagatccccccgatccgcgactgaccggtctgtcggtgttttagtagttttggctttggttttggttttagcactggtgttttcaagtgtcttaggtatctactatgttaggtatttaggcgttttgactctgttttaatggacttagggtatttgagtacctaggtaggtaattcgaggtttcataaatcccaaagagtgtcaatttgcagtattaccagaggctgaacgtggatccctgaatgcaattaattagaaaaagaaatgaaaataataaaataataaccgggactttgtgcacatggcaggtcgagtctaatggtattcgagcacggactgagttggttatcgcgacggggcttagctgcaaggcccgaaaaaccaattccagctgatcaatggccttaaccttggaagtcctcttctgatatataaatatactggcatccacttggtctcgggtctttagcctcataacgttatcacatccctccgctttcatcttccacttctacatctactatactattccctgttcccatttctatttctatttctattctctattctgtattttatctctctcctcttagcctttacctcttttaaccatgaatcgctctccatcgtatgatggccgttcaggctctcgtggtagtcacagcaacagcagcgcattcagcccaaacgccaacccaaacgaggactggaccaagatctctgacctcgcagagcgtcggcgcatccaaaaccgtatcgcccagcgcaactatcgtaaggaaaaaaaaaaaaaagataaatcccatcctaaggctacatttctgactcggcgcaacccaacaggcaagaaactgaagcgccgcttggaggacctcgagagacgagctgcaacctctgcttcgccagaacaatcacacgcagagccggtgtctcctaagccatcgcccaagactcgaacaaagcgatcctcaaaagtcacagatgtcaaacctcactcgcagtcagaccgagctgcctcgtacgactactattcccccgaggaccgtcaaaccatgttcgcccagcagtgcactcgtcagctctctgcctcgcccccaccagtcttctcatacccgtccatgtcgtcatatgacacctaccggcagtctgcctacccccaatcccccatctaccacacggcaccgagcaactatagtgaagtcgcctatcagaccgaatatggcgagcccgttccctcgctagtccccgtgctcccatcgatgcaatcccgcaaactcgcctatgacgaagacctgatcagtccattcagcatgagctacgcaacaatggccggaatcgacctatgccaacagcaagctcaagcgcagtcccattctcaacatctgccttctgggcttccggtacattttcctcgctgagcctactcaccatgccgaccagtcagctaatatatgcccgcattttcttttcccagatgccatcgcttgcatactacgaggaccagcgagcaccatcgacgtcaccagaggcatctattttcacattcccactcacaccggaatcaggcccatgctcgcctcgttcaatgcatggcctgtatgagtacgatctacggccgtaaggtgaccggaccgggggcgagagagcccggattgcgggtacatatttccgccccatccaggcctgatctcccgaacgtcggattcccagtctatccgccgggttttttcctgttgcctttttccgagttggctctccactctcgatttatttatttatttattttgttttcttattgttttctgtctcttttatttgtgccagcctttccccccccccccctattatgtgtgacgagataactgcatgataactggtgttgattcttctttttattggtagcgtggtgttaagggaacaggggtgagctagggagccacgttgaatggattcttttctttttctttttctttttctatttcttcttgatattttgttttcttttcttctttctttgtctgattcctttctctgttttgattaaacgcagatccagagagtacagttgacggatttggataacaatagaatcctataaccttggaagttctcatagtgattggtccaaatccaacttaacttgcataactccacggcccccaaacccatgcgggattttcaatttcagcttagccaaaaacattttacacggctgaaacgatttcctgttctggagatctcaacggtgattgacgtatgtatttcttttctgaagttccccggtttggtagccctaatatccaaggatgagacatatatatgaaaaccaccagtttcttaaagcggacaagtttatacatgactcaagaatcctaactcaagtgcactgtcaactaaggaccaatctactgggaaaatcccgatccctgcagaaagagacaatacccacaccccacacagcacttctttatcccggtatattgggcccgttcgactaaagcactcgaattggctttgaaaaagattttttgtaaattggcatccactttcagttaattccaataaattcatcggatgatgcaatctgcaatatcctccgtctgccccatcagaatccactatcccggttacatagttgtactatacgcgcagagaggtacggaggtggtccgtgaattgtgctgcgcctcaactctttcccccctcctttcaaagcattctgtactttggtaaaggacaacacattaaccaaggtcccctccaaactaagaaacaccctggagccaagcaaaagacgcctagcatgttggctttttttcccaacagtcgcatccacttcggattggcaatgtttcgcccggctagaataaacagtttacatccgggtcccaaaggtctcggagtaatagcccgcctttgacgcctccaatgattgccatgcaagtccggtggcacggatgctatatgcaataacacaaagaacctcaggaaatcatacctaggtagagtgtacggagtattatgatgcgaaaataaccacccaatatttcgggaatagcctactagcgtaccactccgtactctgtcgttcactgactattagaggattggggctgaaaccgaaaaacaacagctaaataatttaggtagttttattcccgctcaacccacatggcaggggttgaggggcgagagggccagccaatagccttctttttcctatcccagcttagcttggggagagcatcttcttatcagggttggcggctctggtctgcagtgttcccgcctatcccccatccctgactggtgtggatcaaaaatatggagatatgcataaacgaaggagctaacattggccaaaaaggaaggtgttgtataataaaatgattttcctcctcctcttcccaattcccctctttgcacgttgcatgttgcatgttgcagtgattcacccgcattgcccccaaccttatctacggcgcaagccaaaaatgtcaactcggtcaatgttgctgaacgaatttggaatgagggaaatcccgaataagactaaggagagaaaggacacaaaaaaagggtctctcagccttggttagcttggttagcttgctaattgacaattttgatctgctcgccaaggaatacctactccggacaccgtgctccgtacttcgtatacagaggatgatatatccatagtacaacatacatattatcaaccattgcgaggcaaccccagtccgagagtagctccatctaagtaaaacaaccaaaataaacaggaatatgcaactgaaaaagtacagcggaacacagttcctagagctatccactacatatgtgaccagccaagaagccgaacgtgaatccctttggaaggacgattaaacccagcctgtcaccgtctagacccatagggcgccttaagggatatgcgccgtcaaactccacattctgcagcggggctggccgcagtcagcacgggagaccgcagtattgggaacggtaggtctttcagtttctatcttgtatgtcgggagttctttgtatgggcgaataattttaaccttgacaaatgaggaaatcgatgcgacgagtgcatatacctatgtacatggtgagtttggtgcttttggcgcagtacagagtattgtataaatactggttttgtttcctggattctggattgggcctttttgggggccattggtccagatcgttaattgattatggttatggggtaatttccacattggcagtgcgtggcactaattgggcatacattgtacaagattgtggaccatctgccacccgaacctctgataatggaattttgaaacgacggagtattaatgggaggattgaggatttaggctcgggttcttcccgacgggcgaagggagaacgtgcgctcgtcaatatttcccaaacgtggtagatggacaatcctagtgttcttatttacagttcttccaagtgctgatatgctttcggtatggtaattaaaggcttgttttgctcttcctttcctattttacttatttccaaattctgggaccaaaggtcccgaagaagttttatatagtgctttggaagcagcaaatactatctccagtctgctctaaaccgggtgaaattactccgtatactaaagctcattgaactgtaatcctagaagctgaaagaaaccccttttctgtcgatatggcttggctaagagacctctcgggaggaaagccactccagtcgcgttgcccagtagttcacctttgttagaccacagatcacaggatgtcggattggaaagcaaaatacttattctctccccttccctcgtggacctctcttgactttcataatgacattactccttacctacgtaataataagttcccgtacactgtaataaggcgatagtcaaatcaaatcaggaatgattatattgcctgttcaatatatagtatctcacatattaggatgtccaacatatttacaggactatcaaggtatcaagtgccaagacataagaaagattatgcagggcattaaagttaaagatctcaccattcgttcgttcattgatctgtctatcaccttattctcccaaatatagattcataggggccaggataatcagaattgatagctggaaagtgatagaacattagagaggaaaccaatatatagttcattgccaactgtaggtcactgttggagattgatatgctccggtgccaagatctacgcgctgaagattcaggagaaggaagagacaacaaagaacccaagttcaacaactgaaactcactatagcggtttcaaagaaaagagaaaagaacacaggagcgtggcaatataaaagccccctcattcagccaaaaccaaaaccaacacaatgcgctcaaagacccactataccagctccatacgataatgcttgggaatcacaatgcatcaagaaccgcccttggccatggatatgccccatgtgacagtttctagcgttacaccactatctcggcattccaataggataaatcaagtcaaattgtacgcgcccgaccccaataattgaccaggattgggcatgcatatacatatacgctaacagttatacgcagatacgctaaatcctcaatgggattcccaggcggaccgcttacccgccgttccgccagtccgccagtccgccagtctggtgcactatacaagatcgacttagtgtttctttgtaccaatttggattataaattatgtgtgcttttttctccaatgatgataaactatgagtaattatgagggattgttataaatcagattgataacctccgtggaccttggaagtgcacgcaagcaaggtacggcctaatacgagactgttgtcataggtggcacgggcataggtggtgcacctttgacatcggcgtcgccgatgcgttaaggtcttgaatgggacaaggaacgccaacgcatgattgaacggactcgggaacgtgctgtatcggatttggaatgttttagtatttccaataaattgggttacgtcggggacgccggtgtatacgagcccgttgggtgacgttcatatgcagttagaggctcaaaggtggaggctcagcttctacttgcagattgcggtacaccacagtacggagtacctgaggctctgttgctcttatgatgatttgttttttaatatgtggaggtggaggtggacccttgaatgttgggctgctccgtactcattatagacatgggaagtgtgaagcattcgaggggaaagaatagtatggaaagcaatgtatactacttcaccttccattcaaaaaaaaaaaaaaaaataatgataataatgtgctgagtctacggacgaaaaaaaaagaagaagaataaaacaatgaatggagacggattgatcctggtattcgaaacaagaggatcatggaaggaggccagggaagatgcgcgcagacagaatagaagcccaatagattagaagaaaaaaagatagcccattcaaagcagcgagtaaaacaagctcaaacatctgtcatcattgtcatcaattcctgaaccaatcattcgacagccaagggtacggcacagatcttcccatgacacggttgactcaatcttggaaaaaaccacgaatgcaagtcttttttttttacccagcttcatcgaccgtgcacgtccatcggatctgtggagactaaggcgccaaggttttgtcgccggcgccgcatcggggctttcttgcggttcgcaatgacagcatcttgcgtttgttccgcgttcatctcggtatcgccatccttatcgtcgcgtatttcctgtggagacagcccgtgctcgtgattccacgcctcgtcgagctccataacgtttttgggtttcatgcgcagccatttcatacgcgggccgacacgcgagacctcagagaccttgaagccgtagattctggggtcatagatcttgcccttaccgagtccgggacagaggttgggtgtccggaccccgttgatttccagcggctgattttccggcgtgggcgactgtgcctggcgaccagccggggttcgtgtcagggagccagtgcgagactgcgttgatgcactccgtggcgacatcattgacaatgtcgcgtcaaggcggggcccgatatccaaatctgggaatgtcatgaaaaacagacatccgaacgttgtaccgaagaaggcgccgtcaacagagtggaaacggctgttggggggtgtataaatatccatgcaaccggggcagaagagcttgaccgtttcgtggccaggggtgtcggaccggcccacggggagcactttgcatccgttacagttgactcgcggacaggtgccgaaatgctgcatctcatatttttcgagcatctgttgaatgccgggccgcgaagtgatataccgttggtgaatcaacccatacaggagctcggcggagctctcgatcacgctcaaatcgcttgcgactcgggcgtgtcgccggtcgcctgctcttctgtatccaggttggtcaccaccgagcgcatcgtcttcatcttcctcctcctcctcttcctcctcctcttcctcatcatcctccggctccacatcgaggatcatctctagtgcctccttgtacatgggcacctgtgactggagaccagtcagattgaaatcatcctcaatgaagtcctccgacacctctgcgaaaaactcatggcccatcaacgaacaaaacgaggaaatccaggactccggcgctccttccgaggacgacatgtcgaacgaggcggacacagatgacgatagggtcgattcagacagttgactcaaatccagcctgtcgaggccgtcggccaacgccgaacctgtctctctcgacacgttgccgagctggggggtgaggtcttcggggatgttggcgcagacgaagcaatttcgtcacgcggaggtgctggatcgtggcgaggaagagtgtaggagttgggaggtgagaacgaaagacttcaagtataataaatagtaggggatcttgaagttgatggaggggccgaaaagctagacgttcatagcaatgtgcgggaggggggagattgtgcgatcaacggggaagaggttggatctaaggctggaccccaccaaaatcttatcagtttcttatagccttcatactgaaaattatcagatcgcttaccagatctcaaaacactcggagattaatattggcgactcgggcttggaggttgggtgtgtcggtcgaatcgggttaggcccgttcggttcgtgggggcggtgggcagttggatagagagagaggtcttccagggctgttccacgtattgtggcagctattgtgtctgctatatctcacgatggcaaaaagtgaagtcaatgctggcaggtttcaatttgcctgagcggcatgagtcacgtgtcagctgacctggggatatagctacctaacttgaagggctattgatactcatatcttggaagcctcaactaaccaatgctgtcattggtgttattacaacatgtaactatcaaagggtattgactaaatatcaaaacaagtcccgaatgactcgagcaaactctccctcatcacccaaaacccccgataaaccttcgccggtgttctgaatttccccatctggccccacgaagccactaataccatcactcgaagtgttaggcatgaaattaccaaaagcgccaacagcctcaaacaggtttgttaactcttggctcatctggagtccatttagaggactatttccgagttcgttcccaccattcatgggtccatacatagacaggtcttggattggatgtccggcgagcccggccatagccactgcagcacttgaatgaggatcacttgagtctggcccaaaaggacgggcgagaacgccaagtttctcgcctattttccgtaagcccttgattgtcttccataaccgcttggagacgtaggacttggtactgaacccgttgaccaagtcgagcgccatgtaaaattcatcgcggacttgtcggttgaattcgaccggagcatgggacactgctaagaacagcaccgccaatgcagcaactaggaagtagttaaacgttatttgctgtgtccggtaaatatcggacatctggtttagccgagttaggacacggactgtgtctttggctatttccacgacagtctgggcgtggcctcggtcttcggcaatgctggcaggagaatggagcacagggcgatatatcaggatgcgtagctggttcatccgcaggtacaagagaaccctgagccgcctcatgcctctgcttacgttttcgttgtttttaggggagccgacgggatagaacttgagctcgtctggaacttgcttgtaccactgtaggatttggtaatccaggtagccgatttcatcacgacggatgtcagtggtgccttcggagcccaaaccagagtaccagatcttggagctgatccggttgtataggaccatgcagcgcaagtaaggcagcgatgcatcctgtaatttccacatgttagttaataaaggtaactgcatgccaaaagatatgcagccttacaggttctggtaagttcggatcaatatcctcgtcctgaatcacgaaaggtaatcccgttcctagactccatcgtctgtccaagctgtagactgaccagaatagtcgagtgatctcgtcccactgcacctcatctgggaatgatttcaccaaagcatcacggcggtgcaatcccatctctaagcacattcgtgccgccaatccaataagccgataagccatggcgtcatcatctgtatggtaatggtatgtggcctggagtgggacacagagttagagttattgactgtgacagttgaagaggccttgacttaccacaatagcaaagagctggatagttttgatggtatgagactcccataactttgattctataaatggcttaacatccaagtagagccgctgcccaagttcactttgaccgcccccttccacgaccagcgtggttgcgagaatcaatttaagaataatcgagctttcatcgtggagaccatcacagcctggaaagccccgttgcgcaaagcctgtcctggtagcagcctctatgaatgtgtagagcagattagtctgggtggtaaccttggcgatatccaccacaggatacatgatcccaatctcttcctcgtaaaccttacaaagacgcattgcctcttcacgcggaatcgtccatattggatccttggtagggtgtgtgattggaagaagctgtcccagattgggagctggggagccagttggagaaacatgtgcggtggtcaagtcgtctgggattccatcttccgctggggtaatacccatattctgtaagctggatttggccacgtcaaaattgaaggccgagcttgttggaccatggaagcgtgggtgacgggctcggggctttgctagaccagcttgcattggagtgtagaccgattgagacccatcgcgcgagagatgctcaaaccctggtgactcaaaagctggtctttgggtacgaaggtcattgagattggtgaacaagctattgacttgctcttgtaaagtggtgatctgatctgtcatcgaccggaactcactagctcggctattagtgtcaagtgccggacgggttttattccttgacttactccgaatctttgaagttgttattacaacaattaggcgcatagcgacctggggattgggtcagctcgaaaccgaggatcggacagctcggacacaggagttgcaagccgccagcagggttaaaagccacttacattccaaattcaggtgaccacaccgttgacaaggcatctggccattgcacttgatcttgcgccgcttgcattcattactgaaaactccatggttagcgctgatcttcctacaaaggtaccgaaggagaaggcataatcatatgactttgaatgcaaaacaggttatccgaccagtcgcaagactggagggctaatcaaccgaggtaacggaaagcagaaaaagtgccggatcaggccatatcgtaccatgcaatggagatgtagcgattccgctttgtgcgcgcctgtgttccgttgccttgttccgcctttctcttgttggaatcggacgcaccgatggactgatcgcgggggtctggttgcggcggcgacatctctagctgaggtgactctgaagccatgacctgcagaatattggagcgattcaatgagtagccggagagagataccggcgtcgaagtgcggagaaattcctctctcgcggggtttccccagattcggcttactcatctgatcatccggccggtcattggccccggggcacatttacaaatggagaatatatgtactcatggatatgatcataatttgttatatggcacagatttctcgctcaggatatattgccccaatcccaatgatacaagtctcgaataaacccgaaagaaaagatatatcagcgcaattacctaactgctgagaccaaccactctttcccagccagcaatgactgcaccaaccgagccctttgttcaggattctggtgtaggaagccaaaggcagcaacgagaccaagaatgacagatccctggagtgttttccgggcacctcgcaaaacccgcccctttctcgtgagtcgcgcagtccaatgccgccacacggggaacgtgcaacgcagccaatagtgaatctgagtgaatctgaatactatgtcagtaacaatcaggaaccagcaagcagggaacgcacggatatgtggttgaattccaaccatcggcagtgatgtaccagctagagcacgccccacgacggaacacactctgctgaagcgcatcctgcacctgctgagtccatacacgctcagcatcctcctttacttcatacgagctaacctgtccattcaagatcggcttgataaacttcaaagagtagtttactgcattctccgtggcgaaaataacactggtgtgccctgttgccgtgttcggaccgaaaagaataaagaagtttgggaaagaatccattgcgatgccctggtatgcctgggcgcctccgcgctccgcccagacctcttcaagatccctgctctccctgccaatcacctttagcgggtgcagccattggttggtttcgaagccattggccatgatgatcacatcggcgggaatctccctggcctcaacggcgtcgtccgacttgtggggtggatagtggcggcccggaccaagagtcacgctcttcgcattgacccttgtcagaggctgggtagtcagttccacatttggggcattgagactgcgataccaggtgccgtcgatgatccgtcgtttacagccgaggctgtagttcggcgtcaagatctcgtggtattcctctggcgcaagttggcgcatgtgatccaaaaacttcttctctagttgcggtcgagctcttcggccccatacagtgtctgtgaacatctcgtagaaacttttctccagcatgaagaaagcaactcttcgtatgaatgacgccagtccaggcacatgggtcatgagtgtaggcgaccatttctcgtacaaggggagatatttgggagggattatatcaggctggacccacggaggagtccgcatgagttgagtaatagatcgaacattggcctctggcctggccagctcgggcactacctgcgcggcgctgcagccggaaccaaccatgatgacattcttgtcctccaaatcaatctggtcgttccagcgagccgtatgcatgatattacctccgaagtcctcaatacctgggatgtccttcggccatgtcttaggttctaccaacccgccgacaccactgacgaccaccttggctcgcacagtttctgtctttacatagattttgtgatgaccttcctgggctgcaattcgatctcgttcgtgctgagctagatcgccggttccagggacaaggtgcgaaagcgtaacctcccattcctcgtcatcctcgatccatcgaagttccttcacatccgtattcagctgaatcttgtccacaatttgatatctctcgcagacatctgccatatactgtgcgagttctggaccagatggatggagtgtggaccagtcctttttctgagcaaaggagaaggaatagaatgtcgctggtctttaccttcggtgttagttatttagtaaacaagcttttgacttgggccacctacatgtcgcaagcagctcccggatacctattgatccaccaggtacctccaataccggactgacgctcgaatattcggaactggtctgtccccagaacctctttgagccggcagcccatggcaacccccgactctccagcacctactatgagaaccgggtaataagtgtgtgcatccttgctgtaagcatggcgcttatgaattcgggcgatggaagaaggcatgttgcacgttaacagtaattacaggcaacacaatgacggtgagacctgggacatgttaatattgacgtggacacccaacgtggcacgaaatgtaagtgtatcttgctaggaaaatacaagttacataaacggcctttcgccaggtgtcttcgacgcgcaaaggtacatatgtatgatgtagcttctcacaactgcgggggatgcctatcgacctcggcttcacgtacggagtaacttcattgtgatcgacaagtggggtaatactcctacataaatgactcgtgattggatccttttcagagaatggttagaggggaaataatacgcaggggaaattgcttggtgacatactaacgcttgtgcttcagtagggttcgcagcctagggttcgcagcctggggcaccagctaaaaatccagtgtgcggactccatctatgatatggagggtctgagggatctggtccaagcagaggaacaggttcaatatcaataagctgcgtaggccaatgaactacgccatcgtagtatatggatttcaccagatcccgctccacgggccaaccctgcactgggggaaactggaccaatctgtagaagccataaacagcgtcttccaattccacttgcgtatggggtttgcatgctcgcagaggaccacatatatgcctaggtggaatgaggtcagtttctgtccctgaatcggtagctcatgccacctacatagtctgggaatcagtatcgtaaatgagcttttgatacctcggatgtctttagggctcccgccttccccaccgccttagccttctgtctttcccaatggcgttttggtagtcttttcggtaccttgtccactactcttttactcttttttgtggtcttttagatgtcttcttcgatcttttcttatagagtagactttatgttgaaaccaggcgatttatgaatatgaaaacaataaaacccatgccccggtatacgtactattactcttttctgccggagcaaaagccggtttatcatcgtgatcttcttgtagtcgcctcctttcaactccccacgtcgatctggatgaagctacagccatggtcaatccgtgtcagggcaggactcccccgttcatccctccattataaaccccgatcaagtatccgaaccctttccgctccttcacaccctcaataccgaccactcggcatcctcgaaaatgccaccctggacaccttccaacagcgttgcttcctccctgaacaaccagcaattctcccacgctctaccttccaaggtctcccggccctgaaacaatggttcaaaagcgcgagtccgcagtcaacactaggcaccttaagcttgaacctggaatatctccacaaacacggcgccgacgcgttcgtcccactcgagctcacggaatccacgtcgacagacactacatccgaaccggacgacagggcaacagaaatccatagcttccggcagttccacgcgccgctcacgctgttcctcgactggatgcgcacggccgagtccactccccaatcaacacgactatacctagcccaatgccagcttcttgacctccctcccgtccttcgagctgatttcccgacgccggagcttgtggtgcgcgcgggaaagggcgatgtatacgatacgaatgtgtggattggacacccgcccacttatacgccactccaccgtgacccgaacccgaacatctttgtccagctggctggggagaaggttgtgcggctgcttgcgccgacggatggacaggctgtgtttggtgctgtgaggaggcagctagggaagagtgggagtcgggaagcagcggctttccggggtgaggagatgatgcaagggagggagagagcgttgttagatgagatggtttgggggactccggtttctgctggttcggatgctggggttggctttgaagcgtgccttgggcctagtgatgggctgttcattcccaggggatggtggcatagtattaagggagttggtggaggtgttacggcttcggtaagtatgtttaattcgtaggcttcgtgtctgtcgctgatatgcttgcaggtcaattggtggtttcgatagtataacatctacgaccgtatcaatgcggcatgcccgcgcttagaacgccaatgcccggtcgacctaggctagatcaattcgaatgctctctgtgacatgttaggcgaaaatccggagaatttgggctatatgcttggaacggccgtggagatcttcaatgttcccggcaaggtcttccaagctttgaaaccgctgggaacatatgcaaatcatcggtgatgccaaatactcgtttacagactaaatacctttacgttatatatggaggacaggctggggagattttgttctagcagactcacgattgtgactgacccgtggtcacacccaaggcctctcaactgtgtaagctcggtgtcacagacaaaatcgaagatgatatacccagcgtataacaatttgagtaatcattaattgtgtagacataaccgataacaatacaaagcgcaacgcggagaatgcggtgtaacgatagaatcgaagtgccgaagtgttgactctagaaacctgcaatccttatcttcctccatcaaatccacctagcctcctccgaaaccccgaaccatgcaagtatcgcgcacagtctaccgcgccgctctcctccacttatccgtcaatcccttcgtgcgcgcctcagtccccgctggtactaccgctacctgggcatccctcaacccggcaatccaagcaccgaacacccggctctacaacatcctcttcccgcagtgcacaacaaccttcaaagcatcggactgcgcgcgccaaacacgtacaatgtgtgactcaagttcgaactccggctccgcatcctcagaccctgcagcccaaaatgcagacacccaaaaccaagagacccaagaccaagaaccccaaccccaaaagaaactctacctccccgccagcgacccctcaaatcccgtcgcgaaccaacaaggcgacgggggcattgaaatcgacatgagcggaggcgggacagaagtgaaactggatcatctgggtccgatggttgttaacgtggacgggacgttgtcgcagatcgggaactggcagcagatgacggagattgagaagactaatactctgcgcgttcttgggaagcggaatcagaagcggttggaagcattgagggctaaggagaaggcggagggagggtcgggtgaagcttgattgtgtataaaaacatccgacgcggagagctcgacctggcctggattcgtgtgtgttgatggaggatgtgactctccttactgttgatgtatgttgatattgcatatatgtattataacaggcattgttacatccatggatgtggatgtcgttagatgtcaagtacgactaataatcgcggctattgtttcaaaacagtattttccaataaccacagagcattgattgggtatcatagtgatgctaacaccatataaacatatgcagtctacagtccaaagtagagacaaaccaccgcccaatgaatcacgtatccacaggtctgcatcggaagtcagctgggtgcgttctgatcgtaagtatatcgcaattagccaaaacaacgatgagacccatgaaaatcttattcaaatataatttggcaccacttgtgcacgaccgttctatgggcattgttagcaccgaatcataactaggaagagagggtatactcacttcggcggtatgaccacaaagtctctagtatactcctcgatctcagggacaccagtgaccagatcgacctcctcgggcttgaggagcttggtcccgtggaacaatttccacccgaaatagataacggggaagacgccgatcatggtgtaggagaagaggaatgtcgggatggaccagttgccaggaaggaagacagtgtagccaccgacgaaagccatgagcgtagtgcttgcgcaagcgaagtaggcgatgtacggctggaaccagctgcggtatggcaaagtttcccgggcaatgccttgggccgcgagagctttcttgaaacggatgaaggtgaaagtgacgacggagaagttgatgagctgggaggcggtgacctggatttagggttagttggatgtatggaaaaggaattgggactgggactgggactggggtggaggtgggggctcataccagattgacaaaccagtttaacacgaccgatgcgccgttagatacctgcaggaaactcaagaggccgatgatgagcactatgccgacacagtagacgggaacaccactgttggtgcacttggtaaggaacctcggggctttgccctcaagcgctaaaccgtacagactgcgactggcacagtacatgtaactgttgcccgcgctgaagcaagcagttaaaatgacagcgttgacgatgtctggcaggattgggattttcaagcgatccatggagatgacatagggcgaggcagcagcaccgggcttgccgttatcgaaagcatcggccatggtcttgtcgttgtacgggaccagaatgccgacgcagaggacacctagaacgaagaatgctgtgagacggtagaagacaccgttgaaggccttgggcagcaccttgcgcgggttaatggtctcgccagcggccatggagacatagtccggaccggcgatggtgaaactggctgtgatgacacctgcgaggacacctaggaacttgccagtatcacctgtcttatagtactcgttgaaggcacctggttcgttccaataacggaagccaaaccgatcgccgagcgggttgccgcccaacatgacgatgaatgtgtagaagatgaggcctatgctgagcaagaccttgcccagtgaaagccagaactctgcttcaccgtaccatttcacagcaaagagattgagtgctctgtttcctattaattagcccgtatctcgtgcgcgcattgaataagacgacaaacccatagagtataatgataaccacattcatggctgcgacgggaatcacatcggtccagtatctaataatcaagctgacggcgacaatctcgaatggcaccagtgccgcctcaaaaataaagaagttgtatccagcggcaacgcctaaagcttcatcaacgtagcggccggcgaatcggatgaacggcgatgagataggtaggtacgtgaccatttcagccaagcctagaaacgaaaatgtgagtctggatatcatactacgcaaccggatggaaaaaataagacggaggaatattgcagcgattgggcgatcggttgacattacggcaagctgaaccgttggcgcatttgggatcgtaaggggtatagtttcaggtatgaaggaatgctgctgctgggaaagatgcaaagggcttgggaagcatgggggtgttcgtacagacggtgatgatcaaaatcacacaactcctagagaacagtataagattgtggacgttcaatgagctatacacagaaaccaggcaagggcatcatggactgggtttagtccttgggtgtccggctggctttcggcagatgcatgggcagaagtagggctaatggcgactttggtcgacattcataatctggttggcatggaagtgcttgggctaacagcgtcctacatccttggtctgaaattgtggaatcaggcttcgagccttgtttctcgatgctttgtttgtttgggtggttccttattctttgcttctttgcctctttgcctctcttttcttgatccaatggcgggcttattttccgtttctggtattaccgcctacttaccgtccatgttgatgctgtcgaaagtggcgaagtcgggacaacccaggtcgagaacccaatagagtcaacaaaacagtataacaggggaaagactaaccaaagactgaatccaatgaacaaactggcagggccactggtccgcagtccagatccgatctgaacgtatagagctgtaccaattgttcctccaattccgatcaattgtacatggcggggtttaagcttgcgatgagtatggtcatacgtggatttcatcgatccgctatcgaccgaggtcgcgcgattggcgctggatgagtctttctcggtgacttctatttctttgtccatcttggtaggcttcgattcggggtcagagaggaggatgggctctgcgctctgtatggctgccgccatcggggtatggctctcataccccgagttaggaggatgcgacatcttgaaggtctccttgtaagctccacgaaagagcaaaggaatagcacaaacaattgcgcaaaagagtccagaccgagatttctttcaaaggaaatgtaaggaatgcagacaagagagaggcgacaggaatcaggaatgagagtttttcctttttccttttttttttttttttttttttgcctagctgagtagtattttcctgtttcgagttagtgggatttgttaaaatcttctgaaaaggcaatcggcgtcggccgaactaaaggaaagtccagacaaggaacaaatcagagagtcggcccaagagtgtctgatgttcatccattttatccccacatggcccctcctaaggggaagcgagggggaattggggctgacctgatcactctgtgcgcccattggattggatacttcggtctgtatagggggctctcaatcaagagagtattgttcgcagtgatcatacgatacaactggcaatgtcagaaagtgctggccaatgtatcatgtatcttctgagtgtttatgttgtaggtagattataataagtccccgcagctatcccgtgtggagagatttattgccgaggtccattgggggaatggagacttttcaccaactccaaggcattcgcaagagtaacttaagccccaagtctgaatatctgaatatctgaacacatggatacatgtatacaatatacataactaagtacagctgttatattaaacatgaatccctgtaattaacacacgccacattccactattctcatgtgcttcccttgtaggcactagtgctagtgtccctagtgccctcgaagttgttgccacccgagttttcggtggagagtctctgctgtgagtctttcccgatccaacttggtgggaagaagccgtcgttgtcttcaaaatagaggtgatggatcacatcagagtctgtggagttccggcgttgatccgggtcttgatgcggatgttcggtagtagaacttggatgtggatgcgtgccggggaacgacatatcgaataatagtattttactgtgttactggagatgtgttaaagaaagcaatcaaacgcctgagcagttgacgttgtagaactctcccaaggtcaggtgcaagctctcggtcaatatcctgacgtcatgagatacatcatatcagcactcttactgtatacgagggctaaccggattgaggcaaaaagagagaagctttgtaaatatcggaaggtaccaatcccgaataagcagtcgatcacagtatttgatggggtaataatctggaaaggatatattgttcgtattaggaccgaaatatcaaggttaaccatataaccccatttagagtgtatagaagaggaatgtaaatcgttctaaatgtatatagggttcaagcagcatacatatgtaagaatgtagctaagtacatacaatacctaggtatatgtgtatgtagattaaccggtcaatcagacagccgacaagtaagcagccctgaagctcgggctacctcgggataccccgccaaccctcaagatgtttttttttccctctacttcacctccaacaatcacaatggtcgaacaaacaggagaatctaagcgcttcgaacccaaagtggcagtccagcttgacccgcctaaggacgacctcatttctgtcgaggaattggccaaatgcgacggtatgagagtttacccttcacagattagaaccccaccaattcctgatttccaatccgctcagctcaaagagtgtcactaatacctactgcactgcaggtaccgatcctaaccgcccgactctagtcgccatcaaaggtgttgtcttcgatgtgacccggaattcggcttatggtgcctcgggttcataccgcggtgagtacagcatctattctatgaacagtataatgacaacaatactgactgttgtgttctcttagtcttcgccggcaaggatgcctcccgtgctcttgcttcatcctctctcaagcccgaagactgtgtaccggagtggtatgatctgccggacaaggaaaagaccgtcttggatgagtggtacaccttcttcagcaagcggtataacattgtcggcaaggttgaaggcgccaagaacacctaagggctacattatcatcgagcggcagctttcacctggatcaaatatgcggcattatatacccaatgagaaatggatcaacgacccagtatcgaatatcaaatccatgcttttcattttcgaaatggtggtatcgcgtaggtacaaagaacagttcttccctctgactgctgggataaataatgtctatacattaaaaagtaacatgtaacatttatgcctttaattccccttacgggacttccgcttcatgcgcttctgtccgataatgcggttgcgcttggcggccttgtcctcctcttcactcttcccatctttgggaccctttccattttcagtcttgccacgcttcacgtcccttccatcctttcctttcccaccacgagtatcggagcgcttcctcttctgacctctgtctccctcaccctcagcatcatccgagcgcttgggcttgggttcgcgggacttagcttgcagctcattacggcgcttaacaacctgggcattctcaatggcaaactcaacaacgaggctcttcttcttgtccctgtcttcgggatcttgggcagaaggaggaactgtcatggagtggcagttcagccagcgcaaactcatcagcgcgtgacggtgggtgaagaactcgatgaatccgtagccacgactgcgaccgccaccgcttttctcggagaccttggtaccctcgcgagtctcgaagacgaccttggcctggcgcacaatacccatcttcttctgtttgcggagctgctctagctccttcatcgtgtcgcgggatcgctgctgctcctcttttgagagcggctggcgcgtgcccgccttgacgtccttggcgaaattgacgacggactctcgggcaagttgtttcaagtccttggagttgatgtggcggggaaggttgcgaatggcgagacgggtaagactgaggtggagagctgggtttttcttgatgaaggtctcgcgctgcttgtagctgtcctcgcgcatcttcacttcggagggagagagcttcttgtacagcggggagttggagggaatcgtaccctcgctgaggaggtacagacggcgcttgtctgtgtcacggaccatacggcgtgatactccctcctcttccaacttggcggcttgacccttactcacggcccgtgcgacctgcaggacgcggccttccagggtgtagcggccgcttgggtcggagttttcatcttggagaacggagtgcttcatagcggtgtttgacttgggcttgtctttgttcggtgccatagcttcagctcctcggggggcttcacgaatgcatgtgttggcgtcgtcgggcttccagaagcagacgaatccagtacctcgggggcgctcagtttcgtagtcaaggactacacgtgcgtaccgtagcggtccaaagtgggttttgaagtgatcgtatagtacctggtctgtggcggtgaatgggaggttgcgaatgaagattgtagtggcgtttcgctcatcctcctcctctgcctcgtcatcgtccaaatcgtctagctcgtccaagtcctcgtcctcctcatcgtcgtcttcgtcggaagaggtctcgtcgtctgagggctcttccagagcaccctcggcatcttccatgtcaacatcatcagactccttctcttccttcggctcctcgtcttcctcctcgttatcttccttcttggttgtttcccagacgtctttttcaacagcccaatcaacggcgagttgacgcccatcgatctcctttccgttgatcatctggagtgccctctcggcgttctttctgccacgcatggtaatgaaaccgaaacctgaaagtttgccattcctcttgggtagagtagcaaacttgacttttccaaagctgcggaacaggacgttcagatcctcaggctccttgatactccacggcaggttgcgaacaatcagcttgggcggcaggccctgccctctctcctcttccttctgtttcttggactcccgggaggcagcagtggggacactacgtccaaccttctcgtcaatctcacgcttacgagactcggcatagtcaacgcgaatgactttcccgtcgaacttggacccgttgagttctttcagagcgctctccgcatcctcgacgtcggcgaatgtaacaaaaccgaatcctttggacgcctttgtctctttgtcgcaaaccacaacagcatgcttgataatgtatgattgcgagaaatattctgcgagactttctgtcgtggctgaggtgggtagtgagcggacgaaaagagttctcttgttctgtgcggccgaggcctcggcggcgggtgtagtggtctcaactttgatttccgggctctcagtgtcggagaggcgtcgtttcttgtgtgattcgtccatggtggttttgttgcgactgcggttttttttttcctgcggtcgaggaagaacaaaaaaattagcggcagaaaactgagccagattggcccgggcggtgtgggtctcacatccagataagccatagttagtagctttatcgatttatcgactcttagttgatcgctctgcatttagcaacagaacattgataggcgcgatggatcccccgcgtccagagagtggcatacctgctcgccctacgaactctcctgctccaggtgcatcttcaagatctaaagtccaacagccgaaaccccaaaccctcgtcaaccgccctggtacttccgcgatcttggtgtccacacgacaaaaggggaacccaatactgacccatataaaactcctaccatgggagtatgctgatattcccgcggactatgtggtcggcactacaacgtgcgcaatgtttctctctttgaaataccatcgcctacaccccgaatacatctactcccgagtgaaacaactagcaggcaaatacaacctccgccttgtactggtgatggttgacataccaaatcacgaagacagtcttagagagctttcgaaaacatccattatcaacaatctgaccttgatattgtgttggtccgcaccagaggctgcacattatctcgagctctacaagtcctcagagaacgcacagcccactgccattcgagcgcaacaggcccaatcctataaggagtcactagttgagtttgtcacagtccccagaagtatcaacaagtccgacgccgcgagtttgatctccactttcggcagcttgcaaaatgccatcaatgcacagcccgaacagatcagcgctgtgccgggatggggagaaaagaaggtcctacaatggtgccatgcggtccgggaagactttagagtcgagagtacgaagagggccgctgctcctgccacacaacgccgggctcaactgccaggcgtgaacgttgaggacatacacgatcagaacatgggtgaagaggatgaagaagaggcgattcttcgtgaagtactagccgaaagcaggaaaacagcagctgcgcaagctgtgcaagctgcgccccctactgagtctcaggctggccagcaaactgaagagatgagtgaaggtattgcagcggccattgccaggctcagagacaatgctggttgagagccgaatctgactcctcttcactatatctacttttgagccttcagcttctagagatgaacctcattgtcacctacgtgactactgagtagggtacttcttacttgggaaggaacatcatccgctggtcgtcaggacgcggggacgtaatggcattcttgtcgacggctgtcaaagcttgaatgatctgggagacctcatgttcatgataaattccccatggccgggacatggatctagctcacgaaagccacccaccccaacacatgaccccagctaggggtatatctccatttctacggcttcagggaactgacccttccggcgtggctgagcatgattctttttgcaatgcccaagaattcatcccaacatactccgtacatgactctcacatcccttgttatgaaaatcctttttgggggtcaggctaggatctttcttgtggtttccttattgtttgcggcctcgctgcctttccctcgcgggacctgtttacttctctttatctgaatactctttctgtaccattgtatttacatatattgataaaatcattggtttcaagtgcatctgttgctactgctacattccgaacatcgctcttcatatgccatccataaatgtttcgcggggttataaaatttcgcccactccttccaaaaagcttgattacgctcgtctcctagatattcttaagctttgctaggcattgctgtttgcgtgttcactcggaatctaggtgaaatccgagtagccaaaaattcgccagttggattccagccttggccctacccgccaatacaatagctgactaaccaggtgcttactcatcagggacgtcgacgaggtcgtgggcttcatctcaccatttgataagtatgcattctccgcgctgaggtatctaggcgcaagccaaatatagaatgccaatcgacatgtcgattcactcgggccattcaaacagtcgctcaagggtcctcccaaggtccaagctaggatgcaaaacttgcaagtaggtgcttccaaggttgcttccttttccatagtcagagtttgatatcgagcgtattgtagaatccgacgagtcaagtgtggagaagagaagcctagctgcgtccgatgtaccagtacaggtcgcaagtgtgactttgaagaagtaaggccctcttccacaatctcggtcatcgccaaccccttatcattatcgccaaacaccaatgcagtgtggcgagagcgacgtgcatttgcctattattttgagtgtgctgcctcctctattggtggtggattggatgttgatttctggcgcactgttgtcccacaggtttgccgctacgaacctgctgtttgggatgccatcatcaccattagtacgctatttgagagccctcagcaatgcccagatcctgtgctccaacgccgcgataatattatttctctcactaaaaaccgtcaagacgccttgcactggtactcgcgctcggtatctgctattcgccagcgcatcgagcagggtagtgtagacgtctttgtcggattgatcagttgtgtgctttttatctgcattgaggccatcgagggaaatgcagacggcgcaatgcagctttactatcaaggcgtgcagctcattaacgctttgcgtccccaaatagcatctggggccgcgagcaaagcttccctgttggaggatactattatccctatctttatccgtttggggacattcgcactcgccagtggtggggctcctgtgactgctttactccgaggcagtgaacatgccttgacggaacggttcgactcgctcaagcctgctcgggaagcgattgtgctcttatctatagagatcccgctctttgaacgcagttacgccaagcacctacttcaggctcaggtccctcatttgcccgaagagctcaatactgagctattttgtctggtcaccagactgagaaactggcgtactgcgtttgataagttgatgacagttcttcgcgccagacaccttttatcgctgcaagagattggtatctgtgcccatttgttgacttatcatgaaatgttacatgtcatgctggagacctgcacatcattgtcgttgatgcaattcgatgcttatctaccaagcttccaaaacattgttgaacaatctgccattgcatccaaagcctcagtgcgatcagatggcacccaaccaccattcacatttgacgtcaacattggtcttccgctttggttcaccagtcttcgatgccgtgaaccacgcacccggcgcgcagccctagccctactccgtcaagcgccctttgtgcaaggattttaccagtgctccatatgggcaaccgtgggccaaacaatcatggacctggaagaatcatacgcaatgggaatgaatgcagcccataatgcccccgaccccgattatagtctacttgaatcaacaaacggaccaattcccagctccgaacttgccgcaagctcatactctgctcatgctgatatggaaccgagaataccaaccgcactgtttatcccagaggaggtgcgcatcggacccatttctgcttttcggccgatagatgggtttcctcctggaaccacagaggcagatatcgcgaagtggaaccggggccctgatcagttcttcctacggatttcccgaaaggagcgctgtctgactggaaatgcttgtccgatggtgtatgaatgtgttccccttgacttttgatcatagtattaatccgggtggatattgatcaacttgatgtagagagttcgcacttgtgtggcaactgggctttagtattctccaatctctagcattgcttcaagtaatcttccttgggtttttcatacggcgtacatttatggagcaagatagttcagctcagctctgaatgtcccatcctttggggaataacaaggaaactgcggtagtaaaagtaaaatgtagtacaattcagctaccacttcgttgggtagtttcttcctgcagaccgtttggtctcaagattttcatgatgaaagtagttagaacgatcaactctcgatagtgatagtggttgtatatgctgcgtagagtccaaaagtttccattgaggtgcgatttttgttgagatatgtgtgcagctttgattgtctgcatgttggcctgatttatcaagccaggctcctaagtagcacatatactggctatttgttgaaatccggtcaccactacctacatacatacgcgtacatacttccgtggtgacagtcgctctttctcttttctcttcgctctttcctcttccttttccctctgttgtttatcatcaccttgggcacggtacatacatggacggcaaggtggctagacatgtctgattctcagtcaatctggcttcgtcggtttctgtctttctgatccttacgcatacatctattccttgattttgtgtcgttcattccctcccctcatcgttatgatgacttgtaacctggacgtctccaaccaggatgcctcgttgtgacttcatacaagttcaacgaagtctgagcaacgtgagatattattacaccatacacgctgagttcgtcaatcaccatgtacttttggctcctcacaaagcccgacttcaagtggctcaaataaacgtggttgtgtccgatgaagtcgttaaagaaatttggatctctgtcgttggttgaacgatatgaggtattgcacagccacgagcagcaccacggttgaaaagaaacctgttcgggaggagcaacaaaggcaagtactgcaacattaccgaatgtggttattctcgtgctaagtgtaaataagtccaatggagccattgcaactgacggctcattcgaacctacgtcacacgcccagctgcccattgcgtcgccgctcgccattgggtacacaaggcagtttacaacaatataaatattcgacttccgacctttggagaacctgatcgattctaaatccttcgtgcctaccaatatcctggttggcaaccctatataaagtactttgcaagattggtagaaaaggtggcccgagaactgaagagttgacaatggtaggtcttgaactctacagggttgagccgaaaaccaggtatatctatttgatagaatcctacatgcttcacctctagcaacatctcgcaacataatgtgagagatggaccctgtcgcaaatgagtctacatagtcaagcacttctcttcgtatggccttgatcggatgacagtgccttccctttcaacttgctcctgccatctagtttccttttttatttttcaacctcatcgcactcgatttcaacccacaatcttaatttcaccttcatcgatctaaaccatacacctctcgctatcattcccaatcatcccccaggatggatgaagcaactatggtaggtcccggcagaagtcgcttggctaactctcacatatcggtcacttcaagataaatgctaattcatctctaataatttctagaaagaccagcgtttcgagttgatcgaacgagacacaatgttggctttgcgtgaagctcgtcttcaagcgactctccagtctaacaggaatgccatacatgctacccgaaacaaactccgacctttactggctcttagcgaccaacagccccgatacttgaactcgaaaatcgaacaattggaggctcttttggaggaattgatgacccagcgcgcccagttgggcagtgattgcgaccacattcgtgctcagcgctcagatatcgcagggttcattcgtgagctgcctagctctcagaattgaccgattaccccgaggcagtcaacgatccaatttcagttacttatcaaagtcctttctcgttctagcctttctcctagtatggtacggtaagatagattatggaaatgttgtatgataccgcaagctttgcgatataagcttagtagagctcttaacttttttggtagctagcaaattgtagaaaggatttcgctctgcacctgtcggatcttctagactgtcgtagtgcttcgaaatgcctttccaatggatttgctcgttcatctaactctcttttatcgttcccagcgcatcccgcttaactctacctggaatgatacatgcacatgaatcgacgccatcttgcctttcacttaagcaacatatctacaatctcacctcctcccctagcaatggaccaagtacgtgtcgtgtgcgcccgctaaagtcctttggattttaagccctcatatatcaatatatgtgggatgaatacttatatagatccgagaattgccagagagactaatatgcagggttagtcgcacgcaacgcattattgcctttgtgagccgatgtggagctaaacctaatagccaccgattctgtcaaggtcggacagtactcgctaaagaatataatcccgttgtggaattttcaatcaatggaaagctgtcagggaagagtcatgggctcagggaatccggctaggagatgaacattatcacatatgaaatgtgaatgcgcataaacaaatacagaactatgttgactagctcagccgatgatcgtcatttgtctgcgtgactgatcctcttgaaaactgtactttccgaagaacacagtcaacactccagccaatgggctagtcgaagcttgtggagagatcacaaaaggatcggcatgtaactgagaaaaaggaaaatacaaggtgagattccattctcacttacacgcagtttggccagtagcttcatagattggtcaattcttcacctggtctatatgcctagtcatgtctcgggcaagagaagcgagggtacatattgagggtgtgggggaaacgatacgtgatgaaatcctagcttgagcatggaaatcctccaatttaggttctcctgccttcttatttaatcatgcagctttctctgataggatacgaataatttagcagtggacctctctgcaaagtgcgtgatcgacaagcaaaagtggcgtgggccggcccacgaatgcacgagcacacaggatctgatcttctttttttctgtttaccgccagtggagagtgctctgagaatcagatctccacatatccaggaacggcccctgcagtgcttgactagttacttttcagttagtcactggtaaaaatacgaaatccgatttcggtgcctatttactataagggcaatgattccttatgtgtccacgtgtggtccaacctgatttagcccgctggacagctgttgaattctacagtcaactatcatgggtattcgccctttgatccgaagagcacgtgtcgtgttccgccgcatgtcgactgaagacaatgacagtggctccctcacacagaacacggcccggaatggtaaagatggccctccaagtcccgtcagctctgtggcgctcgaggagataccagacgggaatgcccaacatggtgtgcaagatgtcgaggccgtgaccatgacgtggacgaggggtatgttgatcgcatttttcatcaagtatgttcccagtcactgtattttgtgttgcgcatccaattccatcatctatttccgacagacgctgacatcatgacccaatagcatttggttcctttactttgcgaatgcgtttcaatctactgttatcgttactctgaacccctatgtgacaagttcattcacagcacactcgctgtccggggttcccacagccctaggtgatgtctttgcagccgccacctacctacctgtcgcaaagatgatggatgtatggggccgtgccgaagggtttctcttgatggtcatatgtttaaccatcggcttggttctcatggcgacatgtgatagctttgggatctactgcgccgccaacgtgagttccaaggaagacatgctgcttactacgtatactgacggaaatataaggtcttctactataccggtttctacggtatggaatacgcagtcgatgttatgacagccgacgtctcaaccctgaggaaccgtgcttttgcctatgcgtttacttcctccccatacattatcacggcatttgcgggaccaaaggtggcaaacgaattttacgaccaggtttcttggcaatggggatttggctgctgggcaatcattgttcctgtggtggcggctccgctatacataatgctgaagtacaacttgtataaggcggagaaagaaggctaccggatcaagagaccaagtggtcgcacggtagttgaaagcatccgtcactggactatcgagtttgatggtaagtactctacttgctgatttctatcctccacgagagaaagcaaaatctaatttagaacactagttcttggagtcttcttgttcactgttggtcttgtgttgtttgagcttcccttcgacctcgcacattacgcccctgataattgggcttctggctacattattgccatgcttgtcgtcgggttctgtatgctctttgtcttcgctatttgggaagggtggctagctccagtgcctctttttgaatggcgacttcttacgaaccgcactattcttggtgcagtccttttggatgcaacctaccagctctcaaactattgctggagttactacttcacatcctggctgcaagttaacaatgacctatccattaccacctccaactatatcgtcaatatcttcgatatggtctcaggtgtgctattgctagccaccggttggctaatccggagagtcggccgttataagtggactctgtatattgctattccactctatatcttcgcacagggattgatgatatacttccgtcagcctaatgtgaatgttggctatcaagtgatgtgccagatcttcctcgctatcggtggttctacctttattcttgtcgagcagcttgctattctagcggctgtcgaccaccaacacgtcgccacagcgctcgctgtgttgaacgtggttggcactattggcgatagtgcgggtcttactatcagtaccgtcatctggcaaaacacatacctgaaagctcttcttcgatacctcccggaatcggcgtcgctaaatttgaacaaaatctacgaggatctcgtcacacaacggagctatccggtcggaacccccaccaggctggctattcagaaagcctacgcctatgccgaacttcgactactttctgttggttgtggcattataattctcgcgattccttggacattcatgatgaaagatatcaatttgaagaggaagccacaagtcagaggtacagtcttttaggatgacaacaagtataagataatacctaggtatagaaatttacgcggctcagaatgaatgctattccccagcccccacgatagttgcctgtggccgtgaaaaatcaagccggtgaaccattaaccgcctcagccttaaaagttataaatgcgggctctgaccgcgtggctcagagggaaataaatggcgcggtggatcctctctctgccaataaacttggagcttccaaggttcgcagtaagtttcggatcagataactcaaaactctccgatcttggtcaagtgcggttaaaagtgggtccgtggcaggggcggctaagcaaaatgccgatggtcggttgctgtgagaacccaatccgaggtcggacgatggttcggggcctttcgtagggattaacgtgactatatgtggattgctgcgttagtattctagtggaaaataccccactacaccaccgaagtgacttatcaatcgcttggcgtcgccctcaatcagttcagatacaatgccatgtgaccacgacggtccaagcagatgtatggttcgaatgacatccgatttaactattccatggcttcctcatcacgatggatcagacagagaccaaagagcggagggactccggatctcacgacatcacctctccgaagaaactcgtcagccagtaccacggaagtgtggaggttgttagggccggaactctcgcagcgctggtggaaaatctgacgcgccacgacaagcttgacggttccttcaaccgaaccttcttcgctacttataagtattttacctcaggagcagaacttcttgagctcctcattgatcgatttgactgctcgcctcccacattaaccgccatacagacgacggaatggacgacacagacaaagccactgattcgattgcgcgtgataaatgttctgaagcactggctcgagcatttctggtctgagccaaaagacattgatacagatcgtaacttgcgaatactgcagtcattcgcaaagcgcgccacggacgccatcgggacaagcgcaacacatcaacttctcacaatcgttcaacgccgacttgcgggccttgattgccacagaagatcggtatcatccatctcaaccgcgccaaagccaattttgccacgaaaattagacaagctccagttcctcaaaatcgatgccacggagattgctaggcagctgactatcatggaagcacatatgtttggcaaagtacaacgggatgaatttttaaacaagaactggcaaaagaaagggagccctggtacacctgagcgagctccaaacatcagggccttgattcggtattccaatcagctctctaattgggtgggcgccctaatactcgcagagtcggatgtgaaaaagcggactcaagtgatagggcatttgatcaatgtggccaacgtatgtggtagtctctggcctcaccctcgtaattttgcctatatgctaattttcacctatgacagacatgtcgtcaactccataattactctgcggtggtctctatcctggcaggcctggaaagcgcacccatctatcggcttgctcgcacctgggcaatggttaccgaacgtagttgcaacacactaaggcccttgcaagttttgacatgcagtgaacacaattaccgggcctaccgtgacacgttacaggttgcggtggcaccgtgcgtcccttttcttggtcagttctctcgttaactattgaagttgccagtgcttaaccatttaccaggtctgtttttgaaagatttgacattcatcgaagatgggaacccagccatgacaccggaaggactcatcaatttccacaaatatactatgctagcatcaaccatccatgagattcagcgtttaaaagaagccccttactccttacggcccgtacctgagttgcaggaatatcttgttactcaactacaatcggctgttgacttgcacgacatgtgggacaaaagctgcgagttagaaactcgaggccgagaccttggaaatagaccccgggacctatatacccccacaggaggcatgttcgcgtctatggtagtcgcttgcatggtcctggacgattgatgtgtttacgttgatcgaaagtctgaaattcggtggtgtcgtcatgttgcacacttagccctcaacaagagtcttctagtgtccaaacacaactttcaacttctatatttatcatccacatgtataacgtccaatacgtaaagacgatagggtattgaagctgcagtatttaacaagaaaattgccttttcgggtttagaggggctttaagatgaatataatttggatcaagataggcactttaccataacccataatcaatataactagcgttttctgagcaggataatcctacccctttcctcgtcttttttggtccacggaagacaatatcccactgatgatcaactacatattcacggccaagtctaccaataccaactagctgatcgtccatgcgatgatccatccaggcagctaagccccatcccctgctcatgcaagttcggttccaacatagcccccagggaagcgcggtttccgccctgctttagagccataccataaagtagtttcgtatggctggtgtgccatgtccaaattcggggtgctgaacctacttcttacggggtcaacgcacaagtttacgtgtatatttctacgcgaacgaattatttctgatctgcctctaatgctattagcgctcatagacatgaatctagactttctaaggtatggagtacggaccccccaacccatccgtaatgataatctggacctgcgcttggctaatttccattcttctagttccctagcgctgggttaggagaaaatgtgacattgcctaccacttgattataagcttctaatataaaggcttctagtgtttttgccatgaggctcgacttggagatagagttgctcgagagcgcttcactacggcaaaggaagcaccttgatctgtagctagaattgatgaattatttccgaggttttggttgggattaggagacattgacgcctttccaatgtcctaaccaaaccgttttctcgtaagcttataagaaaacaaaccggagcactttgtgacagcgaacagtattcgactggacagacaatgggctcagggaaagtcccgcatacactctcatgatcagtttcaatccgatatacgactagatgttctgactcgtccaaatatcaaaggacgcggtgcattcattaagctcagcccgatgatacggaggaccgaaagctgcggccaggcgactctccatgactctccatataaccagatatgatatatcagaaaagaacaccgcggtaagatgcacttgcggtgaatataagctcttcttggccttaattccttccgtgttagagcgtggttcgggccgttggtgtgttgaatggtgtcgactgtctatactattctctagaatgaggttgcagcagaccctccccgagctgatttagatacgtctcgggatacacagactcagaagaaactccggtgcccggactttatgggaactaccgggaatgagaagcaagagatagtcccgacaccttggaggggcccaatatattgacggtgcttttgcgtgttccgaaacgtgacgagtccgtgtatgcacatgtctctggcctagattagaaactcagatctaataagtcattgattatgatacgaaagggaagttgactgagctccgatagaatatcttttttgggtataaagaggtcagcatgtacccggtcaaaccccatgggtggatagtcagtcctaatataagagccaagaatcataatgcgctgtcacaaagtgctccggtttgttttcttcgtatcaatatcgcttggtagtccagtgccttcctatacatcgaaaggggctcaggatggtccaggcatctttaacaaactattcaacacatccacaagtcgcgctcccttcagcacggacatatatcaagagctatctcagctccaagccaagatatcagatattgcaacaggcaaaatcaagccagtttcaaccatcgaaaaaggtctctcagtcctttcctcaattccacacgacaacaaccgaacaagccttcaaaacgccatcgacatagtatccctaggtctagtcccatcaagtatcaccgacattctcaacggcataacaaaccacgaaataaactccatagccaacaacaacacaaagaacccaaccccacggatccacccaacaaggtcgtttgaggacgcaccctatgacatccccgaagaaagactccgcagcgcaatttacatccccccagccttttcctatggcgaaaacaacaaaatccccgtcctcctagtcccaggaaccgccgatccagccggcagcacctactacttcagctacgcgaaactctttaccgcaaacccacacacagacccagtatgggtcaacatcccggaaaactcgctgggtgacatccaaagcaacgcggagtacgttgcatacgcaataaactacatctcggcgctctcacagcgcccgatcggggtcctaacctggtcgcaaggcagcatagacgtgcaatgggcgctgaaatactggccgtcgacgcgagccgcggtaagcgatttcatggctgtgagtggtgatttccacgggacgcttcttgcgacgctgtgcgtgttcgccaagccgttttgctcgccggctgtgcagcagcaggcgtatgataccaggtttattcgggctctgcgtggtgggggtggggattcggcattcgtaccgacgacgagcgtgtactctggggatgactttattgttcaaccccagagtggggactgggcttctgcggccctgggggatgtgcatggggtcggggtgtcaaatgtacaggtgcaggttgcttgtgcagggggtgctgccgggggttcttattcacattcggctatgttggttaatccgttggcgtatgctttgtttgtcgacgctttggttcatgatgggcctgggaagttggagaggattgaccttgatgctatttgtggggagtctcttgcgcctggtttggatgtggatgattttttgggcatcgaggatgtgtcgaacgtgattggggtgctgaatgtgttgttgtatgggtataataggaatgaggagccaccgcttagggactatgttcactactaggcgatgttggtttatacaggatgctggactgggtggggatgatggactacggatggttgctgaaggcaaggctatatcctgtattagccccaggggaaatcttaaagtccatactggacagggctctatgatacatgtacaatgccaagtgcttccattgggtattattgtgtggatctctagaacgaaactccaagtccgtagagatcaccacggcaacaaaaagcatagcaggaaacctccccgccgccagccggcaagtggcgacacaacaatgagtatgaataagaaggaaacagaaaacaaaaataaagtggatataagacccggcaagcagactggaagaggatgtgccgcaaacaaacgttggaaatcgcagttcatcgtaattcgggggactccattgcatagccagcgctgactattcaacgccgacacccgaggaatggatatcacggcatggggtacgtggacagagacatggcatgctaaggagcaactcgaaatgggagtcatcaaatttggtcaaaagaaaatgttaaatgaaaagcgggcgtttatgtaggcttttcacatccaatgcgacccaagagagctttccgatcactcggatcgaaaggaacacgaccacgcccacgcgcgcgcaccgaggcagtgccgttggaccgccgacgacccaagcctggagcgtttccagtttccagtgggtcggcaggggcaccgtccttggcagccaagtgcgctgggacgcgagatggggtctgaccttccacttccgcttcgtcttcctcgtcactgcgggtatcttcggcattaccgccacaaaccacaccgtaagcgacacggacaatcatgctgaaccatacaatggacagtacctcgaggatcaacaggagggataagaacatccatttgagagtggggttgaagcagatggggttgtccaaactgaagtatggaccgagcatgtatgcgaaggcatttggggcctccgctgagatgaactcgcttgtcgagccggtgtagcagccataggtgagttcacgggggagatcataataaacggaccagcacaccatggggtagatgatgtgtcgggtaatgaaccatgtgcccatgaagaggccgaagccaacgttgcaggctgtttcgaacttggagtacttgaggatcttcgcagactgcaggggtattagtagctgtttagggacacttgatcaatagtaatcaacgaaccggtaacaagaagtccacgacatccatgagacatagcactacattggacacattatacatggcgtagatgtaggcagagctgaggagagcactggtaataatgtggtgggaaagcatctgaacatggtccttccgtctctcttccacgtgaatcacgaagatctgctgcacaaggaatgccagctcaacgagaagataccacttcatcaagcccgacaaaggacgggcgggccactgtgaccacatagcggcaaaatctccccagtagtatgacgtcttccagaggtactgcaacgtagaaacagcggttagttatatattcccaggaagatacgtgggccaaacgcaccaatccgactccccaaatgaacgaatagtacatagcttgccaaccctgctcagcgaggcggagcgactgtttgcgctttaacccgcatgcgcgggccaatggttgcaggaaccattcgatggcgatagcgcggataccggtgagtgcaatggcagcactgattacgaagtagacatcgttccagccctgcacgtaggagttcgaggattcattataataggacaattggaagaatggctgggtatatggacggagcgatgggtagaggttatgaagagccagcagcatagccagcgtggtcatggagattcctgcaaagaagcaactgatgttagtgatactagtatgctcaggatgtgggatttcgcatatgccagggattcatttgggagcatttggaagcgcagcaactctgtcagctgcagcttgcttttccgtcgtctccatgcgagccctaggattgaggtgttttcttcataccgatctggttggcaaccacccattcgcggaacgtggtctccttggccggccgtattccactgggagaggaaacgtagacattgcgccccttcagctctactggctgcgatggcacaactgtgtctgccatggtggagagagcaccaatagtatggaggatattcgaaattccacggaaggccgtgggataggagcgggagtcggggagtcggggaatcgggggagtcgggagagtcgagaacgagccaaaatgattcaatgccgagatggatgtgggacctgcctcatcagagctttatgtactttctaacttgactcgttcaaccaggaacgtgaaaagcaacaacggtgaaagtgcaagaataattttgtaggaaaaggagggaatagagggggaacgtggttcaacattcgtttcatctcttcacgacgatcatcgctccactcaccgcctcgtttaataaatgagaccctgggaggtgtgtatgttgtatgcactaggttaagatcttggcttgagatttgatatattttcttttttctggttggattccgtataaggatgtcaacagtctaccatttccggtctatttacactctttggtcagtcttctatgtcttggcgcgggatatgagaaatgggataataatagatgtggtacgtacacctgtacgatatatattaagacatatggagaattcattctaaaccctctgtaacgtttcgcacaaaatcattggcattgacccccaattgagccaaatcaattccaccctgcccggccatcacgcgcgacatagctctagcaacttcttcctcctcccaaatgttgttgatgatttgctccccaccttctccaggcccttgagtggggttctcggaagccaccatagtccgccaatacaaatcatctcgattcttcaaagccgaatcccgaactaccgcattgcgagtgacactcgcagcatggagttttgagtttgcgcccttgagcgtctgcacggccaccgataccgcctgatcaacctgttcaaccgtcgagggcggcttgaaaaagaaccggttagttgcggaaagccagatcacaagcgagcagatcgcatcgcagatcacgaaggccagcggtcgcaggagcgtgatgttgttgtagatgctggagggcggtatctggcctgcgcgcacagagcggggcgcaccctggatcgcgtcgtaagtggccatgatgtagatgtcgatagctgcgagggcaagtccggctatggtgaattttgtgcgccagcgggaggcctcgcgtcctgcgatgggcgcggatgtggccacgcctagaagtagcaggtgcgctaggtgtggtagcaacacgtggaatgggaggtagtatatgaggtacgtgtagaggttgtcgaaggagcagtattgacacgagaccaaggcatcggggccataggtcaggtataccttgcgggcacccagagaggtgaacttcgactggaggagggtgtcggcttcggtgaggaagttacctggccgaagccgggcgagacggttaaagatgacatcggtaggggtgttcaggcgagagcgagtctgagagaagatgttgggttcgggcgcgtgggggttgaaaggtaggcttaggagtagaaagaagacgatgcctgcgaataaaatgttcagcgctcgaccgggcgcggcaggcagaggacgcggcggtggccgactcgcgatggatacacgaagacttcgataggcggtaattaagcgagggagtatgactggaccgaaaaatattaggagtgatttgacgctattcacggttaggatagattgcggaggatgtggagagcttcaagacttacgttccccaagagattgtggtagccatatttgctagaatatggaccttacttcatcagaaactcgaaccagttgaatcgagtttcgacgaaagaaaggtgtaagagtgttcggatgtccaacgtagcttcattgaagtcggggccaaacgtgggtcccgtcctttctggacattaccttcaaccaccacttctacactgttctgatcaacaatgcttttcagtttccttttcaaatttaccttgaacgactataatagctacacaccctacgaatgttctagcataaaaacgatatgtatcaattaaatctgttaaacatcaagaagcaaaagcaaaagaccaggggaataaaacagcgccgaatgcgcccatcgcaataacgcaagatttctcattcaatcaaggcgagtcttccctttccttcaaaataacgctattttcgacctaattgaccagtcagccagctcaaaccatatggcccgagtacatagcagggtggtgtgcgaggtcaggagggcggatctccgcagagtcacgagagtatttggaggaagcggcgtcgttctcttcaacgagagtcgggttcatcggcttggagatcttgagtgggaaccgaccagtgagacgattcgtggcgcgcttgacggggttctggcgagtgtaggtgggcagggtttcctcgcgcttcacgctcaagtggagggtgcggtggctgctggtcctgctcattgccttttgtggtgcgacggcgccatccacccgcacctggcgggcactgacgccggtcgcgggatcactgaagatgtagctctgttgaaggaaacgggttagcattcaaggatatatattagggggttcggagtgtttgatctcgatacttactgccagaacattcaccacgctaactatcatggccaggacaccggcggagatgataatccgccagaaagtcatgccaatggtttcctgggtcatggccttggtgttcaggttgcccagtgtggctacacccaggatcatcatgatcccgccgagagagtagaaactcgattcttgtccgaacatcggccagtggttgtcgaaatagctttggaggaccgggagctccgagattatcatgaagactgcccacgttagcattttatactacaagcatggaaggaagagtatacttacggctgaccagagccaccacggcatgggtcacagcctcgaagaagaagaagctgttcagcatgtcgatcttggccagcaagactgcacaagcagctataaggtccataaaggtgataatgttgagaacgcgaatgacgttcaggatcacgtaccctggaccagccagggactcacgcaagcgagtcatcatgattgaggtacagggctgtttctgcacttgtcaggaatggtggatactcgctgtcgaggatgtatagaaaattgtctgctagcagacttggaggggcagcgttgggattaaaagagggaagaaagcgactgtccagcagaaagcttgataattccaagaaagaatagaacaatgcaatagaacgagatcaactcgagggcaaggaaagaagaaagaaagacaaagacacaagagaagggtgaatggcgacaatggagaaaggcatctatggaagaatggccattgaggtacagcagcctaaatgtatgctccggacaaaggcaatagtactatttctatgaatagacttgaaacatctagatgaaccacacaaacagtatgtatctaattagagccctactgaaagacatctgcagggttcctctaccccatttctgcagtgaggtatactgcaggaggcccggggtgtttcaatatccgtgtaataaatagggacttttaaccgcagagatggggtcgtcgccagaacaagcctaattacctacatctccgctattaggatctcaactagagcccgatgtagccaaatgactggcccttagtgaaagatactcgaccatgctgaaacgagttggcggctagaagtcgcccttctttcctccgtgttgccggtgctttgtttccgtatgcctcaaacataccttatcaactgatgaatacagtacaaagaattctaaatcatacatgtatcaacgttgatctggcaagatatttgaagggtaaaatacattttaggtagtgggctttgaggcaaagcgccaggggtgaagtacatatgtagaaagccagagttgaaacaagataagaatatagcccaatcacaggcagcgcctagtcgctgaaatgagtcaatcggataaaataacaaagaaatacttgaaatacttcgacaatccaacgaagaacgttgagaagaaccttgcaagtgtacagtgaaggtatacagaaagtactagatgagtggaactcctgtgattcgccggaatccagccgacccctccaaactcccgaggtctttttttccctctctcactctccaaccgtttcgcccgcaactacctttaatactcttgaacataattggaataatattataaccatgacacggggtaaccaacgtgacaacgaccgggctaaggccctcaagaaggcgggcaacacggttcgtccttattctcctcctctttgttcatactgaccatttctacagaaaagcaagaacaccctgtccggtagtgaattcgctaggagcaaagaagatgccgctgccatcatgcgcgagaagcaaaggaagggtatgtgtccccgaaggcgctaggcgcaagtccaacctacactatgagactggtttactgatcacttctctcctacagccgatgaaaagaaagccgccgagtctgcagcaggaaaaagcaaaaaataatatacctcaatccatcgatccaacctgtcagtcaatctcatcttcctccacctttatagcgatcgcccgaagcagacaacccacggagcagcatcgcaaagtgtactacgagtgaaggacggcgctggatctacggatacgatcggaatcatccacctatgtccaattatcaaaacctggggctgggtgtctagcgaggcgttttttgaatctcattggcgttcatcatatttagcccaagcatgtatacaaaagcgctaaccaaacgaggtaacgatacatgagaaatatcatggaggtgcaattttggtggtaatcgtaaacacgtaaaaaaaaaagatatatacatccatcacatccggttatatatcttgcccttggccgtctatgacccaacatactctcgcccgggccagccaggtctgccatgacttctcccgttgactgtcctggtccttttgggaatcacgagatctggcttcgtgatcgcagtgcgacagcatgatatcctcgatcatgctttcaagcacaaacagccgcgatgcttggtcgacaaacgtccaaaggctctcgccttcccatccaacgttaagcgcaaacctgaccactttcccaagagcattcgctcgatgttggtccggggcattgctcagcaggtagaggctaaagctccaacccgatatatcgcgtggattaaccaagcaccaatcaaccacgcgttcgacaactgactgcgccgaatgggtttcccactttggttgccccgtcgtcttctccactgttgcagcgaggagcacatccaactgtcgcatgtaactgaaggcataatagttcttgggatgtaactcgccagcgcggagaacaacttccagttccgtccgttgcagcttgagcagatcctcgggactccaatgccgcctttgaagcagatggacaaccacccacagccggtgatgccagagtgtcggcgacttggtatgacgatgtagtggcgagcactggtagctcgacatgagcgtgagctcggcttctaacaactccgttgcggcagaggtctggtttgaaacaccagggcaatgtgccatggctgcccgcagtcggcgcttgcgccagttacaggctgtgagatgctcacagtcaaagaggagcatcatttctgtaatagccgagtctgcatttctggactgggcgttttcggaaaatgtggtttggaggtcatcatcggacatgggcattaattggtcgaagaagagctggcgcgcgaccgtgaagccctgcactagtgctttcttggttattccaagtgaacatccatcttggagaaatgtagcgcctaggcttggtgggatgatctcgatctcgaggacttggttgtctctagacgagaagatacggacaagttcctggaatgcatcttccggattggacatttgaaggcttgatcgtctggtggaaatcgggaggaataattgtcaaggcctcatcgtatcttgtctgtttaaataattccgtatttttttttttgccttgcctcagacaaggtgatagacgagatggtgtagaccgtgacacagtgaaggcggaaagaccaagtccgctgttatttccacctttccacaacgagggacgtcattcataccttcaaccagcaaccaacatctacccaggacattcccagtttgaagcagcagacttgtcagggactcacttagttgactgactgtcgtcgctttcattcaggctcttctagcctgcgctgtcgcatttgacgcctgatctcggtcttgccagcccccgccacgatgttgtccctcgtcctcacggtctttttcgtgcacgtcgcaatctacctggtcaatacgattggggcaagcacaattgacagccttgtatgtctccaatccgcccatttgtgggctctgggaagcttcccagctccgccgcgcacctacactgtgatccaacacgctaacacctactctctggcatacagctatggcttctttatctaaagctgccgacaccaacctcgcggactgcacgcaagcagcagcagctgaaacgtcaagtcctcgagcagaagcatgaaatgaacagcacaagctcccaggatgagtttgcgaagtgggcgaaggctcggagacgacacgacaagagcatggaggaatacgaggcgctgagtacgtgtcactatcacaagactgcaaaggaggcaccgttatcttgttgactggactgctgacacccttctctctccacagacaagacgctcaccgcacagaaatcctcctttgactggactgtcaagatcgcccgctggttgagcacgaacgggttgaagatcttcctgcagttctggtactcgaaaacgcctgtcttcccgcttcccgaggcctggttcccttactacgttgaatggattgtgtcctttcctcgcgccccgcttggatccgtcagcatacatgtttggagtaatgtctgtgcgactaccatcgcgctcaccgccgaggttatgggagcattgctggtgcagattgtcggtcagaagaaggaacagagggagactgcgcctgtcagcgccgagggcaagaaggcacagtgaatacgacaacatggacctggctatattgcatggaaacgggttgtactatacgaagagaaatgctacgatttagctacgaatattgcattttaatcattcatttcgattgcattgaaaaattggctatatagaatgttcatcagataattttaaatcgtttatcgtcaacaatcccttgggatctctgtgcttgactctatgattggtatatcatcacgcgaacaagaaaaaaaatgaagcctatggcaagatataagagtccggcccctgtgacagggcttctgcaatgagacagcatctcatcaccgctttgccataagctacagactcttgaaaagaaaagacaacggaactcctcgcctcaagaatgagccccattgagttacctccatcgacttccgaggaagcagacaggaggcaatcgcatgactatccgaacatgacgaaaggcaacccaatacaagaaaaggtgttttaccaccaattcttcccctctccaacacccagcacacaccccattgtttccagagacatcgtgatgtaaccgtcgggaggcacgggatgccgtgagagaatagggcgtaagccgctatcgaattgcttctatggcggcgcgtttccgcagtgcctggcttggtacttcggttttacccgaagcgcagggtgtccggggactttctcccaaagcaaaattggaaaagggagccaagcttccttttgtgtgtgagctttgaatgcgattctttgagcgaggagttggaagaagaagaggaaacggaatattcggggcgaggcttttatttttcttgcgctagtcaggtgatggcactagtcctacttgggactagcgtatatggcatcgggttagggcttgcgatgttccaggttatatacaacatacaacataggaaagtaaagtatcgagcaagacgcggtgcaaatgatgggttgctcactgatgaaatcgctcactgataaaatagaaatagagagaatatacctcaaaagaagtcctattagcttaaggcatccctatcaaccactggtattcttttcacctttcacatttttccttactattcattgttcatgctaatttagcctttgaatattaccaaaaggaacttagtgatgaaaggaaaagaaaacacaatgcatttgagaaagaggcttgatgaatgaaattaaaaacaatttttacatgatcccgtttacgccttggacttggtcttggtggccttcttagtgacctttcccttcgccttggtggcaggagacttagcagccggtgactctgtagcagctgccttgggtgcctctgtcttcttgcccttcttggccttcttgggggtatcatcggtaggaacaggagcctcaacaggagcaggagcctccgtaggagcaggggcctcaatggccttggtaggctcctcagtggtggtctcaatggcctcggcggcctcgacagccttgggggcctcctggacggggacatcatcgacgctcttcagttggggaagatcaagctcgtagcccagagccttcatcttgttaaccttggcctctctcttcttctgctcggactcaatgttcttcgaccactgctcgcgtgtctttcccttcgcgagacgcttcttctcgatgcggttccatggcgtaaccttgaagcggcggttggcgcccttccagatctccgggtgcagctgctctttgggcacgaacttgcacttgacgatgtgaccgtacataaggtagttgtccattgtgtcggcgacgatcttggcgacggtggtcgaggagaattcaatgaaggcgtagtgcttggagcggccggtgaagcggttgcgcgagagacggagcttggtaatttccccgaattgggagaagtaagccttcatctggtgctcgtagaaaccgtgggggatgcgtctgagaatgggatgttagatggttcatactagtcagaaaccacggttaagactcacccaatatagacggtaccgggctcctcgggagggccgttcttgcgcagctgcttggcgagcttgcgctcggccttcttggtgtccggggccttggggataggttcaccctctttgtaaccctcgccatcggagtcgtcctcgtcgccgctgctctcgaagcccttgatgagagcctcagtctggtcatcatcaccctgattctcagcctcgctttcatcagcgggggatacatcctcctcggcatcttcctcttcggactcgacgacgggctcgggcttcttagtcttgggagcggccttcttcgcggcagccttcttgggggcgggggcggcctcagcctcctccttcttggactttttagcggcgggcttcttctcagccttcttgtcagccttcacaggcgcgacaggctcatcgacctcttcgtcggtaaggaagtcagcagcacgcttgcgaggcttgacctcgcgtgcgggcacgccattggtcttggccggcgtagcagccttctctgtcttggacttggtacccttctcattcttcttcaagatagacttgggagcggtctccttagttgcctcggcgggcttggcctcgaccttcttggtttttttggcgggtgagtcggcggcgacaggcgcagctgcagtagcgttagtgacatgaaaataaattccaccggtcataagaatctcacatacccttgcgctttgagactctcttgtcaggggccatttcgacgttttgttgtgtcgaattggagactgtatgctgctcgatcatctgcgggaaacttttttttcttctctgatttgcttagaaggcggtgagccgcctcgaccaccgactacgacagttaccgccaagatgtctacttactacaaccccaaatgggccaacatcatgggaaagaataaaaaagggtccttgacacatgcagaggtctgggatgattctgccctggttcagtcctgggacgatgctgtcgaagaataccaggtcagtaaaccgagtcaccaattcacgtgacgaatatctaactcgacgccagcattattggagcattcacgccaagggtgaaaatgtcgaagatgtcttgaaagaagcggaagacactggtgtcattccagctgtacgtcccggtgacaatgaacgcaccaaagccgcagaggacggtgccactaaacctgagaatggggatgtctggatgaccattgacgagcaggcttctgagtctgctcccgaggtatatttccattccaatgatttgtccctcgtcaaaggactcgctgacgatatatagccttctcaacccgtggctgatgccagttctgtagtctccacgcctgctatgccaatgcctcacccaatcatggcaaacggtatgttccgccctcaggacatgttgattcatgtaactaacatatattcctagtccaagatgagtcgttgaagaacctcatgatgtcatggtactatgcaggctattacacaggacttcatgaaggccaacagacaagccgcggccagagctcgtgatgcgattattgctcagagacgaagggaaatttttttttggctcgaatgagcacatcagcggatacaatacaggttgggaacaaatcgtaacggacaagcaatggaactaatcatatcaaattaatcgtgaaacctgaaaaggatctcattaacattccccttgcaaacaaaagtaaacaacgaaattaaatattgaccagctagcgtccaccgaaataggattggcttcagcacagatcctgtatcactttcatatcctgtctcatatatcggggctcgattcttggtgaatcagagtccgcccagtccgcctcctgcgccaccaagaagaccaccgacaatgggaagactgcccaaggcattaggctgagacgtgggcttgttggtaggggtagcagtcggggtcacgaaattgccagaggaaagcttcttggtgggggtggcagaagcagtaggcttgctaacagctccggtcttgccagccaccttcgcggaaacattggcctcctgttcttgggcctcctgcttgttggccttctgctgctcctcatggttctccttttcattgctatccttgttgtcgagaccatccatcaactttgtggcatgctgagttcattgattaatatgatacttctcatggtggctttgtcacagttgactaaccatcaaatctttaatagtaccatcgaggctaagtccgtgactgggggcttgtccgtcacgcttggtgggcatggagagagcaaaaactgcgagcacaagaaagatggagatgaatgaaaggctgaaacgggccattttgagtggtgtatgttaaacaggatatagatggagggaaagaatatatgttcaagcaattgtcttcaaacgagtgtgagcaagaatcgctgaggaaaatgaatgattgttgcaaatacacagggcgctgggagaaacagagccataggctctgcgggccttaggtggaatttatatgcagccccttcgatcacattatggagggagtgggatgccagggggcgagggtgaagagtcttgttgcgactagctaccgcgcgtcttcgcctggtattcggactccgcgtctggaataaacaacaatactattactttgtttattttatgagccttttggccataccaaaggctatttcggggagaaagattagatttgttcagctatatgttgaacatatgtatgggctttaaggcctcctattttgaagtatatccgtcgaagctaatggctagcatgagatcatcaagggatattcgatgatggtgaatcagtgcatcgaagtgaggaaatggaccaaggctacgcgaaccacgcctcattatgaatcgtgccgcattccatgttgaaatgttagggttggaaggacttcatatcatgcctgacagccgcacccgagcgctcagcaattttcatgctggttttagccaaacaaatcctgaggacctgtgcagatttcacagctctcttctgggaacttctgtaatgcagatgcagctactcaaaatgcaggcactaaattcccacagggatggaaacccaggtcttcgacgaagggttgctgcgagtccctagcaaggattgatgtgagatgcagatctacagcattccacaacgacggagcattttttgtgtttcctccgatatcaggaggcggcgcctgtctgtgtgacaagtcatatatggaatagcccttcacaatttatagctgtttacaaggaatgtatctcccaactttgacacgcacagccccatagagggagcggacgtaacacgagggagtctccagaaggacgtatccaactgtgagggcttagttttggcatctttttgacctcaaacatcaatataagacggacaagacttcgaagatgccaagattgtttacatctatatagctgtataggagttagtgggtagaaaaaagaacatgaatatgaatcatccctatctggaggaaatgaaaggaccatgcaagttgcaaggaaaaagtggctcgcagggttgaaactcaagcattaagagttcggtgccagccaaagctaacccctgcgagtaaacatttccaaatgcatcagactctgtaagaccaaatcgcaagattcatatcaatacagcatgttggctcaaaagcgaacccgttcccctctggctgaatgtcagggggcgggattagaacgagcattcttcggtctgggtccctaagctaaaatatgtagatagagtgagattattccatcgacaagagtgtgttggggaccgtgaatatgttttgaagtgaagaagaaaggaaaagagaaaaccgatcgcaaaattttattcgacgggcagtagcgtggattatgtcacgcggtcacgtggctgctatgcttcctccaatgtggatctccagtctcctttgctgtcaacacctctctggtttcgattttaatttgacagcttagggatcaaacttcaatgtcgtaaacacatctcctaattcctctttgccgtgcattagcaggtccacagccatttgggaatcttcaaactagccatacagctacgactgagataatataatcgcaaactcattagatcggaacgacgatacgaccaaattatttgttcgtgttgccgacttggattctatccgcttctcctcccattcggcccagccagcatccattgacgagttttcgtctgtcgaccaagaatcatgcgtgatataatccatctcaacattgacattcgccgcaccagagagagccataatgcggctcaaaatccaatgcaattgcagatgtctccaggcatgaagtggatggaatgtgcggccgttgttattttgaaatcgtcaccgctgctgataggatgaccggcggagggtctacagtctgcaaagtcgagacgggcaacactgttgtctgcagaatttgtaggccacccagaagggacagacattgatatcagcacaatttgatcgttgtgtttaggcaactgctctgatgccaatagaaacgtatagtgagctcgatatctgacacttcaagcggcttgaaagtgaaatacccttttttttttcccacagagcactagcccctgaactgagattgatcacattcccaggcccatcaaaggcattggctgggtcgtgaaaatcaaggcacctgcgagacatattcatcacatgagcatcagaagggtgctttaccgaacttccaatgctgtgggatggagagaggcctacagagatgtcaaggtgaatgatgaaatgtaagagatgatattgaaggatgatattgaaaggctgcaaggctctaagggtgcttgacaatgtcggtaacgactgacgaggcaagatattccttatggcggaagtaatatatatattgagtatgggaatttctgtgagtgaagacgagacaaccttaattctgattatctgagagaaatttgaggtcggccacatatacacatgtagttagttgactacaatttatgttccacagtaattgcgccatcctcacaagttgggattgaagtagatggtggtggacgtgacaagatccacggattatgttgctgctttatatattaataacaaatcgaagaaaatcacctctatagaggcaaaaccttggtgaagcattataggtctccggataccataaatacttatgtgactagaccaaaaaggggtctcatggcctaatacataaaagtattaacgcctaggtagactcccccatgttgtcactgcaggatgctatataagcacacaatatatatagcgatactcattaaatgccattaggtatcttcaaaatgaatgtcttacatagtaggaatagggcacattatagtcagcatcaataccatgttcatctacatccaaatctataggtacttctccctgcagatccccgccgatcccgccgatcttgcgaataggggtgatatcaacacctaaggcatcaacactcccacatgtcccgaaatatctgaaatatcatgggggcaaaaggaaagaagacacataattgcatgagtaaatacacaaaatgggccgaaaagtacaaaggtcatttatccaacttatcatctttctctgcattctcttctttatcttatacataaaccgtccgcaatcaacgaaagacaaactctttgcttggaccaaaatccgctacaaaacaacctcatccatcattccggaagcccgcggaatatgccccggcctagcagaaacaaccaaaccagccctgatagtctcacatgtctccacggacggcgacccatcctggctagaaccactccgcacccagtaccatgtatgcatgtaccaagtggacgcgccagcagacaaaacttccaaactgctccaagtccccgcaaaccgcggacatgaagcaatggcctacctaaccttcttaattgacaactacgcggacataccatccgccggcgctgtcttcgtccacggcagccgctgggcttggcataacgacgtcccagattacgataatgctgcccttctacgcagcctggacgtccgtgccgctctaaagccagctggatacagcaacctgcgttgtgactggagcgccggcacgtgtccttcttctgtgcccccgcagggcagtcttgagacgaggctgtcgagcgccgtgtccccgtggagtgcgcgctcggcatcggatatagcgctgccgaaggcacttggccatatctttggtggagatgctgacgcacgggtcaaagagatccgcaatgctttccatctttatcttggtcggaatgatgccgtgcgtgcgcagtgctgtgcgcagttcgttgttgcccgcgagcgaatctggcagcatagtcgggatgagtatattgcacttcggcagtggctgcttgatggggctgatgatggggttgcacgcaatgttcagcagggctctatggctgcgcctcctgatgaccttgtggctggccggattgtctcgtatctttggcacattctttttgcgagttacggggatgaaggagccattgatctcgaccaattgaatcgcgatgcttgtccaagtgcctctgagtgctattgtcggttgtataggaagtgtgatttgaagtgtcggggtccggggagctgtcaagggcagtattctgtgccgaagaactacaagctacctgagaattggaaggagacgcattcatgattcatgatttcttttgcgattcggaaacttgtttatagaattgatcttggaacattttgggcatatagatcgggcagactggggtgcattgtgaaataaattgcatgtcgtgtcatttcaagtgatagaattatgtacaagttgttcaactaaatgatgtctgcctgtgcctctagaatctggcaaggacccgctcttcggtatctgacagggcatactcagaggcgtgcttcttgctcacgacagacttggcctgctcggcagtgaagcccttggcctccacagctgggttgtagcccaggccgttgatctttccgacaacgtccgagggcacagcagcggcgaccttgccatcagtccgcttgtagacggtcacgacaacggcaccgcccagaccgaggttgtgttgcagtgccgcggaagtaccgtcaatcagacggttgttggcccagccgcgcaggtgccagactagctcagcacattgggcaattcctgtggcaccgagcgggtgacctttggagatgagaccgccggacgggttgataaccatctttccgccatacgtgatgtcgccacggcggaccatctcatgggcctgaccgggttcacacagctcgagcgcatcgatagtaatcatctcattggcggagaagcaatcatgcagctcgcagaccttgatatccttgacattgacgccggcctcagccacggcagtgcggcatgcccggcgcgacatgccgaagcccatcaggtcaatggagcttttgttgtagactgtatcggtatcagtggcaaggcactggccggcaatgaggatggcatgttctttcaggtggggtcgcgcatcaaggaagtcctgcgagacaattacggcggcagcaccaccatccgaggttgggcagcactgtagcttggtcagaggctcgtggatcatgggcgccttcataatctgctcgtgggtgtattcggtttggaattgcgagtaagggttgcgcttggagtgctcgtggttgacgcgagcgatctcggcgaagtcctcattcttagcaccgtacctgtttttcacctattagcaccatatcccttcttgtcatgggttgacatcatctcgaggggttgcgtacttctccttatattccacacccgcatttccgaacatttgtgcggcaccgggcgcattggtcacaccccgcgtctcggccatcatcattccaaacagtccagttgggttctcgcgatcgttgtacatggattgtaagctaccggggttcatcttctcgaagccgacgactagcacacagtctgcagcaccgtgagaaaccatcgtgcgggccatggcgaggccagtcgaaccggtcgaacagttgttgttgacgttgtagatcgggatgctggtctggccgaactggtagaacacgcgctggccgcaggtgctgtctccatagacgtagcatgctacaccctggtcaacatcgtcgtagttaatcttggcgtcgagcatggctttgatgccggcctcatagccgagctcatggtaatcgaccttgccccttggcttgatgaacttggtcatgccaacgcccaggacataggcgggggttccttgcttctttcccatggtgtatatcttggattattggtagaggtaaagctaagtggactttgtataggttcaactcgggaagtgagaccttataaagacgaatcagcggtatgtggggagctcagcatgaaattgcggggatagaccgaggtcccgaggaaccacgtccacggcacttgtgcaattttattcacataatcatctcgacattatcatgttgatattgccgattgcgcataacctaatccagggggttggaaaggaaaagagaaccatgtgttctttgattgaactccaaatgtagggtctttcttatgtgaaacaaggccaggacgtacgagacaatcacagggtctactattcatatattcagccattctaatccagttgatctagtagcatgttggacttgggcatctttgcagtcgcccaagttgatatgtcttgattttctacgaacatcgttctatgagccacattccagccaacctaacttgcagtcttcacaagggaagcaatggagtgccccaaacgatctccgcccaatatagcatttccacatgagagggctgtgacagtctattgcagtggcatgaggcatatgccccaatattcaaacggctgctccctactccgtactccatacaggatcgggtataaggaagctggcagcccggaagtacggattgttgcttaatgatctgcagaatctcccaaccatggcaaggtggttgaatttgagtctggaatctggtttatagtcattcgatgatttcgatggatgtgattaattagtgggtgggtaatgagcccaatccctgcgtggggcccggccacggagtactgtcttccacatatattgcacagctcactctgatccgtgggctaaccttctgtgatcttcccgaagtctgctttgcatactccgtataccatacgtatattcctgttctgcacgaaacgtataggagatagcatgatcagaccgcgaccggcggatgtgcctcggcagtgccaagactacatagagatagcgtgatcaatttcctgatagaataagatcagggtctcagtatagatatacacacaacagatcaaacaatgccatttccatgatatccacgggtgtttaaaactgatccggggggtaagcaccaagtctgttctccgctgctgttcacgacgacgtcactctgtttggccctaaaccgctttgagcgcccaagttaagctcggtccacatgccattttactgcacttctctcttcctcttcttcacattgcattaagccaccttttgttgggtgcgatattgagggaatatcgtcggtaagtcctcctcgtcagactgggaagctcgtactctggtttgtcctgctatcgaggaacgtggggaaaacgaattgatgctaatggtcgtcttcccccccacagctcccgaccactatcagcaacacattgctatagacgacacatcctgggcaagaatatccttgctgtctggaacaggggactctcccagaacatcatttgaaccgctcaatcctgcgccacacttcctagataccatttgtgaacgcggggttgcatccgttgccgtggccgtcattggttcggccacctaatatcgaacctatctcataatctgcaaatacggatcgaaacgtgccaatctatattacaagggccttctgggataccttccaacagactgacgatagaactgggttggccgagcccgtttaatggtcaattgtgggacgctgaacggtctactcgagttctgagagaccgctttgcgttccatcgggttccccagcctgcaggtgtaagagactgtgcagaatacgtgttgtgacgtctggagagagattgttatagctattcctcgctgccgccaatggaggtcgttcagggatgactagtgacaacagctctgaacatgcaccattatcctcgtcttcccaccacacaagaacagccgctatgccagaccacagagcttggaacatggatgaggtcacacggaacagactcctcaaaaagtacaaaacccaggtggcttcgggggcgtccaccatttgcgcgacgctggcggtggtgagtgctttattccgtgggcttttgctcggactcctgattgcttatttaccactctaatgggatgtaaaacatgctaattcctcataattccacgggcagactcctttagagaacgtcaagactcgtatgcagacgtaagtattatacgtgacattggggatgggattagtatgctaactgatatgaaaggcacaatttcaagaacatatggcagtgtgttcgctatctctggcgtactgaagggcctcggggatatgtagctggtaagtcggtatccatgggtcggtagctgaaggatgagctgaccgtcacctaggtgcgctcccacccttggcgagcgttacagtagttcgtgtcgtcaattttaccgtgtacaatgccttcaaggacataatctctgataatgtcgagcgggtaactggttccaatcctttggaccactataaacagcctggaagcacccccaccttgacgggtgtgcttactttcaccactgcaggcctcgtcgctggcttagtggcatcgcctattgcttgtatgtttatgttgcttgcatgaaagagtgggaggaaaaggattgacattgaaacaggcccctttgagctggcgaagaatgtcgtccaaacctctgttctagtgtcgaaccgtgcgatggctgccccggacgcagcccgagaccagtctctgcgtcacaaaccccgattggggacgattcaagccatcaagcagatatacgtacgacatggattttggggcctttacaccggtttccgcctgcatgcgttgcgcgacactgtcggctcaggactgtacttcagtgtttatgagactgtgaagcaagtagcagccaaggagttgggtcaggacaagaatcccttcggggcacctatgcttgccggtgctgtttgcagcactgtaccctggttttgcgtatgttatcggatcgataatcgataccccgtttcgtaatgaacaggcactgatatgactcatagacttatcccctcgatacgcgcaagactcgcgcacagagtgttcttttagggaaatccagcgagattggcgaggcctcccaggctgtcgccaaatccagcatgtacaagggcctttccatcattcttatccgaaccggcgtcaacaacatgatcctgctcagcattttcgaatacattagaatgcgtatcgatgcgttgccgaaatgaaccccccgtgggtagggccacgacaatcatgttaggacgaaataacggtccgcctgttgaacattttccttgccatagtgcgttggacatcatggttccttctcgtatttattacccacatacatacatggatgagcttgaggctcattttcagcaaatagcagaagggagtatcaaaatctgaagtgatatatgcacgaaatgaaaagaattaaaacaatgggcgcaattgtcgcagcgctagggtaacctcatagtcggcaggatcttctcggccatatagttcgaatgccacttccaatttctttacccaggttttctgttccatagctagcccggcaatgcttttattactttttgacttgaacaattgcaccgtttgggttaagctcggtcttagccttgcgtccataaaatcatctagcaatccctcttcttcgagaaagaacatcgtgagaagggcgtagatcaacctagatgagagagttatactgaaagtctctgcgacaaacttcagtgtagagtcgaaaataatagcatgcgaactttgcctctgcccatccaagtccacgccatgcgtaaggtattgaagccctcgaatcaatcgccgtcgcatgtcgctaagctgttggaagggagtgcccggtagacacgccacgcaatcgcaggtaaatcgcagggcttgatgacgctcatatctagtcctgccttcgaaatctggattataacagaaattgatctcctcgccagcgtctatgtccctggtagcgaagcttgaaatgacctctccactaacagttggaattttcgagttgggtgtacaagaatgattgaagcgtgagtgcaggggaaaaaggccataggcttcgggctcgtcgtggtctgaatttgcaatgttgaacgagttttcagcgaaagcttcattcatacttgtaaagcagcctgacccattgtcgcgaaggagtaaaaactgtgctttttggctgggcagcaattgttgaaaggcaatagaaacatgataatccgtgatttcggtatgcgacctctggataacgaaggttgggttttcgctcaaaatcagggatcctcggtcaatgcgtcttgtggcgaaagcaccccatcctttgcctggcgagggcttcagctcgaatggtatttcatcaggcacttcaaggcggtggtgcgctagcaaatagtaagtcagatgcattctcagctattaagcagagggacgtacgatgacctgcggacatggcagtgtgagttgtcacaataggaccgggtttgaaccaggttgcgggtcagaatagagtataatggtagaatagaacagaccggataaatcgtgaaagaagacacgatagctctctcagaactggggagaagccgctacctataggccaggggagctctcccaaccaacccgggtttgtatacggagtatgcagggagcaaacacatcgatctccgtaatgcaacaaagaaacccaaaagcatgatcccaaaatggcatagcttgtcaattaataggtctgttgcgcgttggagcacctggatggtgctggacctcgtatatcgggatcgtctggcacagggcaccccctgtttgtctaacaaatctgcgtggtgatctggccggctcaaaacgcgctaatgtcttccttttactacctcagatgtatgaggaaatagcctaggacattgacagggttgtagtcacattaacccacccttggactgggcggagatggcagaggattgattgtaccagagaagccccctagctaggttgaccatcctccacctccatcccaagtagaattttattatcactgcgacccctttgccccatttgctcttatcatcctgtctggctaatgccacaaacatgatggacagattcctcatgtttcgcagtgctgctcgccccctttcgcggcacctagtcgcacaaggttctcggactcgtcatttccatataatcactacggatttcatcactcaagacacaacaggcaacttggtctgtaagaaggtccccgtgtttatcgggaaccctggcgaagcctatgtattgatttccccatcggttggagaaacattccgtgatgccagctctacggcggcgacgcaagaccgatgtaaactgtcatttttccatgacacgcggcattttggcctccgtgagactccttccgtattgggcggaacacacattgaccaagagtgggtttcattctagaatcaccgagttatcctcgtcttcatatcccaacccaatttccccgcaggtcggagtccaatacaagtcctgcaaccattttcttgagcggaaagatgcatgagattgtcatagatggaactgatgatggtacagcttcaatccttgcttagggcagtccagtgctaatacatagacagccgaatttgccgaacacgctagcgcttctgggcagaacctgaagcccgtccttgatcagctggagcatatgtgacctgactccaatggcatatgaagttatcttgggaagaaactgcctttaggtatacccaggtagatcgatagttaaggacgaggaataataatgggcgctttggtcgtgggccattcccagcgaggactcatggacgtaggcctcttcatctattacccaacaaaagcatacagggcaataaagtggcgcgggcgtaggatgagtcatttcaatgtccagaacttccagcaagcgccaaatggaagggtagtgtccaatgaagagtgtttttagccatgtattcgaaacaatcaattgatgcctcaggcgatcaaacgtcatccccgttgcccggtggggttgaacctcccgccgtcaaaacaaacggagtcttccacacccccgcctcgagcgacaatggcatcgtgagtactcccatcagcatgcgagcagctgtgagaagagaggaatgacactaacctattgttctgtttgatctattcagtaatatcctccaactcccgttccggcgatcacatactgtcttgctttccgaagcgatcacccaatacatctcgtccaaatatgatcagcgcccggacatgtttgctgaggatctgatgatcattgatcgcctacgatctgaggccgtcaatgtccaagaaccgcattttagtggcatcagccgcctagtcacatatgcggctcagctgaaatggctgggtggaaagttcccgattgatgtgcgctattatttctaggttctcgctctctgatttggcgttgaagacttaccgttggcttgctatataggttggggtggacttttcgtggtatccagcttttggctttaatacttcgcggccgggtgagttgacttcttgggttcacacccttcgcatgcttctgatttggtggatatgagactaatgagaccgaatcgtgacgtttagtatcgcaaaataacctgcgctttgaactggcgaatgtcttattcaatctcgctgcattatactcacagcttgcatatgcgaccaaccggactaccgcagatgggctcaagcaggcgtgtaactacctctgctccgccgctggagtattgagccaccttcgaaccgatatcatcccggacctccgaacgtcgccgccagaggatatggacgagatgacactgcaaagtttggaacatcttttgctcgcacagggccaggagtgtttctggcagaaagctgttaaagatggactaaaagacgtgtctattgcaaaactcgcagccaaggtgtctgacttctacggtgatgcaggcgactcggctgtcaaatctaatgcaattagcacggactggattcaccacatgaccgcaaagcatcaccactttgctgctgctgctcaatttcgacaggcgcttgactgcttggagaagcgcaagtatggagaagaggttgctcggctacgcgattgtttgatctgtgtcggtgaagggctgaaagagcagcggtggattaatcggactgtactaggtgacttgaatggattgaagagccgtgtcacggaagatctcaagcgtgccgagaaggataatgacatgatctacatcaacccagtaccgcccaagtctgagctcaagactattgagcgtgctagcatggttcttgccaaagcaccttcacaggttacggatgcgatctctatgcttggcgataacggaccgttgggacaaccgctgttctcgaagttggtcccatacgcagttcacattgccgccagtatttacactgatcgtcgagaccgactggtcaatgatactctcatcggagagctggagtcgatgaccgacaagttgcgagagtacgtatccgaccgaaatactgaaattcttaagaggaaatctgctaacatcaggtttaagcttactttcatctctcaatttgccagggtcgttacaagcgctcgagaagccgttaggtcttccgccaatgcttgtgtcgcatgcggaggaaatgcgccaacaagatggtctgaatcgcttgcataggtctatcgaagacaccgccagagtcaaaggcaacgacctggctgtctataatgaaggcgctgaactgctagcagctgagaaggccgaggaccttgcagctcgccataaatacggcaccgatcgttggacccgtgggacctcagaatctgctgcacctaagctttacaagagtttgaccgaaatcaacggctatttcacctccgcccaaggcagtgatgacctcgttcagcgcaagctgcgagattcacactctgtctttatcgttctcactggcacgaatcgggacttggaatcctttgtgcctagtagccggagggtcgtgattccaccggaggttgagcgcgaggctaaccggttgcgcggttgtttgagcgaggtcactcgaatggagaatcggcggaggcggcgaattcaaacgttgaaggacaaagctcgcgcggatgatattcgtacgtgttttctttttcattggtcttggattctactaatgaatcggatttagatccggcacttttgacacagacagctcgactagagcgagaattccccatgcagactatccaggcaagccagttcgaagatctgttcgaggagcagctgaagctatatgattcggaccgtgagatgctggctcaggagcggagagagcaagatcatctctcggatcaggtccgagaagctaaccgggcatttactgggtctcatcagggtgacgcgtcgacaaaggaacgagaagcggcactgcaagatctggaaaatggatacctgaagtataaggagatcatttccaacctcgatgtcgggcgaaagttctacaatgaccttgcaaggatcgtagcccgattccgcgacgacgcaaaggcttttgtccatcagcgtcggatggaggcaagccagctggaaacgtacgtgttggccaccgctgaactaacagattagcactgacgttaaatttccttgaaccagagatatctccaatgccacagcgatggcctcactgcatgtttctccgccacacctgcgccaacaacctcaggaatcacctcgaaccaatcactcctcctctgtcttctcagctgcgcagcctgcccatgtgccatcacagccgcccccgcctgttcacaacgtacgaccagccgaggcagcaccccctctcacggccccccaaccagtgcgggctcccgtagccccgcccccagtttctacgccgagcatgccagggggtatgccgggtatgtggactcccgaaatggggattcgattcggatctgccggtgcccctccgaatgttactcccagtacaggaactggatcggccccgggccagcccactcgtgcccctcaaccgggaacctgggatcctagcaaaggactgcgcttctcttgattatgttgggatacaatactgtttaaatctttctttgtagaatcccagctctcgcacatactctggagttttgttagatgtttaccgctattcctcatgatctatggcgcgagtaatgaggtacgatcatagccttggccgaatatataatttctgcgaattgcagacaatccattggaacggattgcccatgtatttgataatgatcgagacccagttcaagtacaaaatagcatttttatatccacgtaatatctcgtagtatgtatggtacatctgatcgcacgaacccaggaatcgcaagttcgcaatcaacaatcggacagggaacaacgcctaaaagtgaatcgacatggtacatggcatgggatgacggattaaatggaccaagcaattcttctgttcaaagtcattaaacagcgaagtcgatgcgtggcaaggcgaaattttaacctgatgttcctcacagtgcgtacacccacaggaaggactaggaggccacacaatcatcgtcagaaagccccattaggcttaacagaggcaccaagaccagcagtggcatgctggggattggcattgggcgataaactgccattcaacgaagcatggccattaaccccatcaacaagcttgaattcatcttcgatttcagattcgcccggctcagagcgatcgtccttcttctcccctgtcgcgaggaatctgaaagcactacgcagcagacagtataaccaaaacaaattgatggcctgaaggacacccagtagtccgaaggtgatgatattcgagatccagcacttatactgttgagtctcccagttgagctcgtagggcccgacggtccggaactcggttagaagggaataaaggatctgaaggttcagtacgtggcgtagatatatccaggcgccgatcgaggttgcgtagaagggcatcattatgtctggggctatgtaatggagcgattttgaaacctggggaaattgtcaataggtgcgcggaatattttgggtcgtgtcgaaacctcgagaattgggttaggccaagggaatgcgacttacggcaaggaagaaatcactgatatcatgcgtaatataaacagcaatgccgatatacgtaaagtgaaagcgatagctgagcgcaataagcgctaatgtcacaacgtgatgcgtaacgagctccataaagtccttccgcggcttctccattcccagcagcataacgatagcctgctgtgcccaataagccgcctcgaacaaatagtaaaacttgaactcagcggcatgggtccgatgcgggaagagttcgtacatgccacgcgtgttgaagtaccacaccggcgtctggcgcatgacatacaaccccgcgggaccgaggactccaaagtacatcgcggtgtacatctgctccatgaagcgggcctgctttgtccgcgacttgatgcgcgagactgctagagggcgaataatttcttgcatgatgaattcgcgcgtgaaggatagcacgatcacgtagaatgacacgaatgctatgtcccacagacctttgccatactgcgtggaagcattggggttgtcattcgggggttcctctttgtaagagaggaatatgaaatgagagactgggtttgactcggtcgggttgagcgcgtacagtgagaggaaggccagcacgaggactagtggtattgtccacgtgtgcttccccgcgaaatgcctacagcgatggagaagagagcgaggcttttggggcttcgggattgagtctggtggctttgtatggccatttccaattgtctcgggttgcaagccattgatatttctccgcctaagggtatcttctttcattgtttggacccgtttaggggcgatgaacgggtgttttggaataggtgaagttgggatggaaaagtcgatatagttacctaagatatatgtcaatgacaaagacgatagttataacatgtaaaaaaaaaaagaaaaaaacaggctagtcaagctagttaaattagttaaattagctagttgaagctgaagccatagaatgttggactttccttattcggctagttcatcgtattcggatatctcgggccaaagagaatttcctccgaacaaagaaatagagaccacatatgtacctaggtaagagactaataagagactaattttactcgattccactcatccactctgtactccgtactgtccaggctatacgaaacagagagacttttgccagcaaaatatcatcctctatccgattatctactgactgggtgagaatgaaagcgtagtttgactgcaggcgccttggtcgtggcaccaattattttacacttaggacagggctgagtctttgtgttttgtatggtaaaccgggccaattgatatgtcataacatccatcagaagactctctcaaaagtggtctcggtctcacgggggggttcttcaatcaatccaatcggtttcctaaatattaggcgcacgggatatcctgtgatccgacagccctagcttcgggccgaaaaggatctggagtagtacatatgtacctagctaggtatcccggggaaagaaatattttggcttagtatgtactcagcgtgctgatatcagagcagctgccacgaggttctatagtctcacaatacagtcagggcatcaaatccttgtgatacacgtacagtacatccttgaaaccagtccaggatgcgaccggctgcacggtagtttcggcccccaagcagggatgctggtccaccgactagcatttgcaaacaaacataatctgcctccaaatctgcctccggggacatagtgcacattcttgtcataaatctatagctcggagaagaagtaatgcaagatatttgtatggacaaaccgaactccactttttacagattagctttgcgcttaaccctttcctacatagctacatgtaggcagttctgcctgcctacatgtctagtatgtgttttcgatttgtgcgtagagccaatgtactataattcaatgttgatacgcttggggatgcaaacattgaagccgtaatattacggaacttccaaggttgggtaatgattgtactggcaatatgattggccactcaacgaggacatccgaggtccatccgtgggagataacgttgatcttcttccccctatcggctgcgataacaatcttggtacttttgactctattggtcttcggttcattcccttgagatactcggtgctataacattatctcctcggaaatgtctgatattttgcgtggatcagctagctagtaaacaaggggaactccgcttgttgaggagagacgcgatgctcgcagaaccaagaaaacgccataatggtcaaccgcaggcctgcgaaccatgtcgcaaggccaaggttcgctgtgaccatgcaagcccgaagtgctcgcgttgtgtcttgcgcagcctagactgcatttatcaccctgctcccatgaccaagcgccgccctccgatctcccacacgcccatagagttcgacacaacactgcccgacctactgaccactcaaaatgtctccagctccttccagattcccactgaatcttccgttggggcaggaatccctccttcccctgcggatccgagccccgctgcgagttcggggctaacagcccgttctggcgcatcaaaacggaacatgttatttcaagagcagctgggccaacacgagacgacacgcttctctgctgtcttcgttgaaaaccaggatagctttggcgcagtgatgatcgatgccacgaattccaacccccacgagttagaccgagaacctgatgtaatggccaggtcccgcgtggagttggctgtcagaacactgctcaacttccccactgctcgtacatgtgacatgctgatgacagggattcatcatatctatgatgtgtggctgtctccaaccatgattcagcaatgcttgaaacaagtatggacagaatacgccagtgagctaggtgagccccggacacgggaatcagtatggagggtagcgaatgatttattcctcaaccacaaaaggcctcactcgacacctgactgtgatctctcgagtaattccgaccatgcttcgtggatgaactggtttggtggacctcatctgcgttgggaaatgatcgggatcctcttcagctgggctggaatcgcgttcaggtgcaaacaagagtgggacccggtattcgacctacccgagcagcatggacggaatcgcaacaccgccgcagaaaagatgagagagtgtgcagctgcctgcataaggctttgcgaagggaactttgaaatcagtgataccatggttatttgcatgaagaatagcaccagactacaaagcattatcatcagtgatgagagtgagtcgcaaacattcggataaattctggtgttatagaattgagctcatttcagcataggtgaccgtgtacgagtcgactacgggactgtccggagtgcctttataagcgcaggattgcaccgcctcaccgctgtaaaggaaatcactccattcttccaacaccgagcatcacttgcgtcgtcaatgtattatcatgacaaatgccatagtttgttcaatgcgcggccacctatgctcagcaaccgctactgtcaatgccccctcccactcgatttatgcgaggaagatgtatatgggggccgagaaagattggccgtggccattgcaaagcttgacacgaatggctggaacacaaatgggcagatattcacaacaagctggctaagagcactggcaatgcttagtcccatccgggagggaatcttggaactaactcttagtgtcaatttgaagtttacaaaatcgcaggtagagtacgttatttggaagcaatattcatacatttcgctaacttgagccttcttgcagagacctacaagtccagttgaggaatatagttgcttcatatcctccgcacattcagtatcaggggaactgtgaatggcactcacagtcaagcttgggattccatgggcggagcgctcatggggtctacatcatcacccggatacaacttgatgtattgcaatgtcagtttctcctccagcgcctacttgtagtgcagcaattcagtggtggccaagacttgttcgatatcgcccaagagacaatgtctgttatcctgtctctctggcaaaaccgcgatcagctgcaagaatttcaccacgcctttgactggattgtaagtatttggcgacccttgctggttacttgtgggaatacaataataactgatattcatccaggcagtatcatacggaatgccctgtgcgggaattttatgcgtcgagcttctccgagcaagtagtctagtgccacccgcacaactaagcgaactttcgtcgacggccgctgctcgcgactgtgttaaattctcgcggtcggaagtcgttcaaaatctggttatgttcagagccttacttgactggatacggcctacggataacaatgcgcagcttagcaagaagttcaagacagttcttcaaagaatcatcgatgcagtatttgattctttgggctcgtcgtgtggcatgcaaacacagatgccgagcgagcagcagtcccagggacactgtggtccgcaagaccagtctctaggacaagacgtacctactgcaacaggcagagagcatgatgttgactccgatatgaacacattcaacgatatggattggctgaacaccgtcgattggactcaaggtggttggcttgaacaaatcaatccacctttcccctattaagcaatctcaacggaacgagatttccaacagctcagtcttgaacgcatcaaaggttgtttattatgaattgcatgaaccgataagatggcccctgggtcagttcggagtactttttactccgtcggagtgggctacgccgggcgcgacaggggttttgcggggttgataagggccacggcgtttcacagttggaattgaataccgaagaatcggagttcgctatcttcattcccccatttgcaaaagtatccccatcaaatggtgatcaagaactgaacccctgctattatttaatgtcgacaaagcaggtcatcggatagcctagctcatcaacttgcgaaagttctcaaaaggccaacagcagcaataaagcccacttcgattatcatgtctccaaacgactctttcaatacaccccggcagcctgttaaaaatgcaactgtgccgttttggcaccgagacattcacgaattgcacgattatcggaccacagaggagcttccagtgtcgagtgacgtcgtcataataggcgccggctatgcaggagttagtacagcgtaccatttggtcaaaggagaggctagtgacaaggaactgtccatcacaatattggaagcgcgtggtgcctgttcaggtgcgacaggacgcaatggtggccacctaaggcctgacatgtatacccccatgaccaggctcatcgatcgagcaggagttgaacgcgcgttggaggtgaccgaatttgaaatcgcacatgtacacgccataaagtccttgattgaaaaggagaaaatcgactgtgactttacccttacaaggtctatcgatgtatggtccaacgaggagactgcccaaagggccaaggaaatgtatgacaagctggcatcttatgatctggagtacatgaaggatgtcttctttgtgcttggcaaagatgcggagggtgtctcgggtgtcaaaggcgcgaaagcatgcgcttcttttacggcagcaactctgtggccctacaaattgattctccatctgaccgcctcaattctcgagactggacgggtcaatcttcagactcacaccccagtggtgtccgtgactcggcaatcttcgggcagttttgttgttacaactccacgaggcacgacagtcgctcgaaaagtcgtctacgcgaataatgcctatgtctctggtcttcttccgcagtaccgcgaagcgatcgttccctgcaaagggctgtgtactcatatttcagttcctgagggcacaagagcgcctctgctaaataactcctacatagtccgtgaagaggacgacgttgtttcataccttatacctcgtgccgacggtagcattgttgtcggcggagccaacttgcgataccactatgttttgagttcatggtacgacaacgtggacgactcatgtctcattgagcaagtcaaagaccattacgatgattatatgcagcggcatttcaatggctgggaagacagcggggcccgtgtggataaagtctggaccgggatcatgggatacagctgggattctcagccccatgtcggcgccgtacctggggaggatggccagtatgtacttgcgggcttcaatggtcatggaatgccacaggcattcttgtccgctcttggagttgccaagatggttcagaatgggatcgagtttgaagatgctggtgtgcccaggctgtttcaaacgacaaaggataggcttgagaaggcgaaggacggtcctttaggtggggatatactcggcatcaagagatgagatatgtgtattgcacattaaagaatgataggtggagtgatgtagccgggatgttcttaggatcatctagtagtcttctatcaccaatgcaggctcccccttcttcgagatatagcttggtgtagcgatcacctcccgggttgcagaaagtcccactagtgacctcttaattataatatgctgtaccgagtccataagatgaccaatgtactgcacaagcgtctccggttgtctcagaccaagctatgagttactcggtgttaatacgtcgagccgctagttctaaacgagctcattgtaccttatctgtcggagatactttctcacggagtagatttctgcggcctttcatttctgcggagttgatcttcacccgcatttatcactcgtgtgctgctatctcgcaccacccagtcaacatttagctcaaaaggtacttgaatctgccgattgggtcctttacatcttgtatcttatctatctgccaataatgttctccatgtcctcccctctagctgttttctaatggtgacttcacagcgctttggccatcaacaaatatggctataagttgaagctaaatcgtctctggaggtatgtcgcagtctctatccaggaaagaccgcccaacattgccaataactattcgttcctacgagggtacatccaagtcaatcaggatgttcacgctcaagggtttccttggtaacgaggatcctgccgccgtccatgaattcaagaaagacgccaaatccacaatagaagatccggagtcgcctatccaaccagaagatgaatatgttggagacttcaaagaaatttcaactttgaggcaaggccttcatcaaagacacattcaaatgatcgctttagccggcactatcggaacaggactcttcctcagttccggtcgagcgatttcgcggtctggtcccctgggtgcctttttaggatacttggtcatgggctgtgttgccggtacggtaaccctggcgatgggcgagatgggcacgctcattcctttgaacggtggaatagtccgctacgccgaatactttgttgatccagcattagcgttcgccaacggctacaacgtagtatattcgtacctcgtgtctatccctgcagagattgtggccgctgctgtactagtgcagttctggtctgacctcaacagtgcgatttggatcactatctttggattgctcatgttgtgtaccgctttggtctttgtgagagtatatggggagctcgagttcgctttctctatgatgaagatcttgctgatcattggtgtgaatataatggtaagctcagcttgattcctacacgcatgacgggatttaatgctaaaaggtataaatcaggctcttgtgatcacctgtggtgggggtcctgaccataagaccatcggctttgaatactggcgcaaccctggacctttcgttcagtaccttggggttggtggtgctcttggtcgctttctcggtgtctggacatccctgaacagtgccctttacgcttattcgggaattgaaacaattactgttgccgccggagagacaaaatcgccgcggcaggctattccacaggcgacgaagcggattttctttcgtattttgattttctacggtatgctgatttcgcaagaggaagaatcctacttcttgttttccccagatctgacctctttcttttagtcatctcaatcttcatgatcggccttgtggtcccctccaatgagcctaaactcagcaactcgagtggaacagcttcacagtctccctttgtgattgcagccacactggctgggatcaaggtagtgccatcaattatcaatgctgtcatcgtcacgtcggcgtggtcttcaggcaactcgaacatgcttggagggtccagggtattgttcgggctggcgatgaacggccaagccccgaagttcttcactcgacttaacagattttcggtcccctggatcgcaatttcgctctacggtctgttcatgtgtctgggctacatgtcgctctcctcaactgccaacactgtgtttgattggctgcaagaccttgtctctattacaactctgaccaactggctcactatcctggtcacgtatcttcgtttctactatggctgcaagaaacaaggaatctctcgggagtctctaccgtgggcgacgccgctccagccatatatcagctgggcctcgctgtttatgctaaccatcctgctcattacgggtgggtactcaacctttatcaaaggacattgggataacgaaggatttgtctcctcttatatcaatatccctcttttcctgatcctatacttttcatacaagtttttccggaagacgaagatcatccccttggaagatatccccattcagccttttattgatattgccaaccgcaatccagagccccagttaaaacgaaagaaaggccttcgcagactgaacgttctatggaactgagcctggattattgtatatatgggatctgctggtcgttagtggagttgcgagattatttttagatcctcgggttaactcaacttaacatattctaactcgttctatgtgttgagtttacagatcgtgatatgtaaagtgcatgtagtgagaccgcccggggtatgaatggtagtattctcaacactatgtgtttattctacaccgacctttctgtacaattccaagtgcgtaatatatttcaagtctttcaagatttcatgacgaacaaccgaggctcctttatattatatctggaatatcccaccaaaagtcctattcgtctctaccgattcggccacattttatttccaagcctgtagcggtgggttcattaaactgataccccagatactaccgcgttccttaaatccggttctcgcatagagtcatcacagggatgtatgagatcaactgaaacaatgtaatcgtcaggtgacgtccctggcgagctccgagccggagtgggtctggtccgaagatacctgattacccgatatggttagtcccggagtacccacaccgccactgtccacgcatcatctctcgctggagctcacatgtacggagtaaatccattcttatctcaaccgcggaatggaggttatcggatagcggtgtgccggagtcagacaatgatgccaatagacttggcgaagggcattgaataaatgaccctgagaacgtcaggatcaatatgcatcccaagagtcttcagcctgccagttcaattctattcagtcagtgaaaatattgtatacacaacatgatctccccccagaagcatgccgttttcgatgtcgtcggcacctgtgtctcattcgactactttctcgacaccatcgaagaggtactcggcccgcgacttcgagcccatcaactgtcagccaagatattcggttttgcatggatgcaagctgctgagctcgagtctttaatgctccacatgtccaagcggaatgtgccatacaagaaagtcttcagggcgctcttttaccgcgtcttatatctttccgggatccaggacccgagatcgttcgcgaccgacgaggaaagagacatatgtcatgatgcgtattcaaagctggaactccgcccggactgccgcgccatgatggaaaagttgaggaataacgggttcaccatctggtgcttgaccacaggcgacacggaaagagttggcggctactttaagcgcgccgggtttgaaatgcccgctgagaacctcgtcagttgccatcagttcatgaagtatgagtccgcatgggagtctccgcttgatatggtcaaaccttcaatggggtcctacaagcccatgctgaatacattcgcccccgatgatcaaaagtggttcgtggcggcgcatatgtgggatgtgagcgcagctgttaaagctgggtaagttctgccgttttctcaaaacgaactagaaaggtaccctggctaacatatctcgaaataattagcttccgtggtgcttactgctcaatttacgagaaggagtcgtgtattgatatctttgatactaagatggatgtgatggccgagactttgctcgaagtggcggacaagatgattgccgtggcttcctgaattgaaatcctacctgtactttagagattcaagaaacagtttcgacatttcgacttgctgcatataccaatctcccggcaacattattataacttattattctacgcgagcagcgggcttccgtgacgctgcatagtatcatattttctaatgcgattacaagttcgaacaaataataatccagtggaacggatatttcctgcaaaatttggtaaggataaaaagagaaatctcacaagttcgcttgctatgcatattaaattaggcaacaagtggattgaagttggattgaaagatcttctcagaagacgagtaagaggaccttgtgagaatattgaggatcatcatgagagatcgacatgggtgcgcaagatcccggcgctaaatatgtagcaatgccttggaccatccttatcagattgatattattagggtattgatatagttcccaaggggtcccccttcgccccctatgccttcctaattgggtcccgctcctgcccaacacctatctagttctgcctgctctcctcaccgctccgcacttctcgtccggggaactccgtaccttactccgttgagccctgacttgcaaggttgccggtgtggacctggtccacaacatgtctcgaacatgagtccggatacggagaacctactccgtacggagtactttgaccagtatccattttattaaggtgagctgctggtttagctgctcttcctcttccaagatttgctcagggttgtgcggagcaagtccgtgggctcacctgggcaggtcatgagtaagtgggaccgggtcacgtgatgaacagacggcccgagggcgattttcattatgtaagactcgtaggcgtgctcagttttactctaagcaaaacgcagcaaggggacctcgggacaccggggtcggaaagctaagccttaataagctcttaggtagccccggagccgttttgcgagggactctacctggcagccgtctacactcagaagacattcggtatgaaccgcaggccccagatcatagcaaatctatttgtctcaattaagatcgagggacagccaagatttgccaaacattatccgatacagatgcaatctcgaggcagagagtatacctatgctgaacagaacaaacccggtttattttcggaagaaataagttattggagaaagtatgtaaacagtgttcggtgtgagacaatgtggatcaagcaaaaataagctcatcgagtaacatcgtcgggttttacctaatatttctgtggtgattggagtttgttggagtaactgaccatcttttattgctgagatcctttttattagatgaaatcctgtattccacagagctatgtcttacctaaatgttttccaatcctgcgtcggagttagtatggggaaattatcttatttagcgggacacccaaggtcgaaatcttcagtccgccagcttcaccccccataatcccaatatcccatcaattaaacacacaatagaaggggaaaaaaaatggttcaccatatccacatcgccgtcctagacgtcgatatcccagcacgcaaactatacgaggctcgtggactctccagtgcccacttccgaaccatcctccgcgagaccgcatcacgcctgaatgagaccttgttctctgagaaagaacaagtcgaagtccaggtcaccccatatgatatccgaggaggccattatccagacctatacaagctccgcggccatgcaggcgagaaccagatacccgtgcattcccctgtggatgcagtcttgatcaccggcggctcgcccggcgtatacgaaatggaccattcaccatggatgcaagaactcgagaaatttgtcaaaactgtttacaaccaatacccggaagtccgactcctcggcacctgcttcggccaccagctcatttcgcacgctcttgttcgcaacgtggaagacccggtccgcgatgtctgggttgagcaatgtcctctcggccgtgaggtcggaatttatactgttcaattggaagaggcgttcgtaaagtcgttcccgggtgcgcttggtgatcttcccgagggacggctgcgcattcaaatgttccatggcgatcgggtgatggccgttgagaagggaactgctgttacgcttaccgactcgccgccggtttcgctgcccgcgccatggattaacattggaagtacaccaatctgccctattcagggactttaccaccccggcagagtgctctctgtgcagggtcattatgaaatggatgtctttggcatgactaagatgtgcttggaatccgcaccggtcatgggatggaaggagtcgaagttggctttattcttggagcaggttggcgatgatagtgaggagagtcaggatgattctaaggcctttgcctctgctgtggtgtcattcttggctggctttgaacaatgacaggtgggggatgagaaatcccaaataagctggatatctgctcccagcacttgcggggtgaatgtgaatagaataaaattgcagaggaataaaatacacattatgcaaaatggtcatacctgagcaacaattagcactgtgcaatatggagtcgagaattcccgtcaaatctgcaagcaatgcaattcattatgtacagcgctgaacgcttctcaacccgccgagggaagcggggagagccatcgtggacttatgatggctaccttcttaaaaatgtcaaagccgcgatgcacaaagcatccatcccagttttcatcgttggctggatcaccggggcaaacagagccgagtggttcccagggatctcttccatgggaatttcgtttctcttgcccttatcccagagctctgggtcaattcccccaatgaaccaaaaggagcaaggaagcccctgggaagttcccagcgtggagaaatcctcactaacattggtccttggagtatcaacgtcaaagtcctcgaaatggtctgcgaaagacgcagccagttgggacgccagatgtttattattgtcggtgggcgggaaccgcctcgttggtgtgaacaagggcggtttcggcgatccactagcaacacactcggcctcaacgatgcgccgtatagcagaaagtattttctcccgagtctccaacttgacagtcctaaagtctattccaatttccgcccggtctgcaatgatattctccgtttgccctgcctgtaggctcccgaccgtcacgacagcaagatcatttgcgtccacttctctactcacaatgccctgaagcctgacaacaacatgcgcagcaaggagcacagggtctaccgtctgatgcggctgtgacccatgaccaccgcggccgtagagagtgattttcaagctatcggcagcagccatgatcgtgccaggtcgggaaccaacacttcccgctcgcattcgcataacgtgctggccaaagacgtaatccggcatggggattatcgaatagagtccatcgtcaaccatggcctgagcgcctccgccccgctcctcgttcggctggaacagtacgattaaagtcccgctccacgcattctgtgtacgcgccagaacttcggccgctgcgaggagacatgtaatatgcatatcatgaccacaagcatgcatcactggtttttcattgccgtccgcatcagacatagtcactgaactcgcgtaagggaggccagtgagttccttgactggaagcgcgtccatgtcggcccgaaggaggattgtcttgccagttccattcttgagaattcctacaagaccataacctccgatatttgtgtggatctcataggctccgagctgggacaaatgggaggctatcttttcagaagtggctttctcttgtagcgagagctcggggtgtgcatggaaatgcttgtagagagattcataaggagtcagatccacagcagcggtggctaatatgtccgacaagctttgctgagccattttgtggacaggcgacgatgtgttagggaactgcctaggtggtgaggggaaccgaggggagttggcgctgatatccgggggagattggtcagccaatcgttaggccccgggggcttctatctatgttgtaagggatctggcccccacgtctaggggaacacttgtggacctgtggacatcatgactcatttattaatgttgattgtggcaagtgtcctgccccaggaagacagagagcaagatctcgagagaatagaaagagaagttgccgattcaacaagactgcgagaaggcagtttcctgtttaggatcggaacgaactactaagaagtttgatgccccagggaccaggcatccgtcagtgggctacggtcactagttactttctttttctttttttttttttttaggctcttgcattgtgcctcttacttgcaccatagaagatggatacatatctatgagtttgaaggacacctgtacactacttgaaatgtcagtgacaggaaataatatcgccatgtcttgctcacttatttcgtgtaccagtttgcatattctaccactacatctctcgacttgagtgaagtgtgtaaggattcagagaaagcacagaagctggatacttcttgtttttcattgacatgatccctattaatatggactgataaatccgccattaccaaaccgaactatatatcacacacatctgaccaaggcaagcaaacgcagcaaaaaggagcattctaaagaagtggcgcgaaagcagcccacaaaagactcattaacccaatatgagggatacttatagaccctgccacattgaaggctggagaagatgtagagggagttgctgaactagtcgggcttatgcgaaccgagctcgatggaatacgggaagcattgtcagatgtgttctcatcgccaccttctgtgccctgagtacttggcacggtcttgattgaaccgggcaatgatgttgtaataagcacgccagatactgatgtcgtcacaatcggtccaggcactgagctcgtcacgagggagcctgaagttgatattgtcacaacagatccagagaaagaagtggtcacaagtgaacctgacaccgaggttgtgacaatcgagccggaagccgaggttgtgatgggagtgactggctgagttgtctctactgggctggatctttcctccgtcgcagtggtggtagtgctcgtggcttcagtgctgatggtttcggtgctgctggctttagtagtgctagcgtgtgtattcatagtactcgtcgttgtagctgctgtcgatgcttccgtgctggaagtagtggtgatatgggtgcttgtcgccgtagtctccatttcagtgctggtggcactttctcctgttgtggaagtgaccatgtcggagcagaaattcagccactgtgcaaaggtcggcaacatttgggatgaatattggttagagtcagattcagcattgttggtaatgcattgctcgcaaacatccaggttttccatgaacgccgagtcactctcgcaaagctcaggcgtcttcccaagcacttgtggctcatgtgcagcatcattgcaatcattgaaacaaacagtagggatgttcgttatgtcggctcttttcatctttttggcaacagcgaagtcccataaggacatgtcgcgcttactgccccctgcaactggatcttctgaggactggaagatagagtaattgagaccgaagtcctccgggttgagattgtaataaattttggagacattgtactgccaagacggatgaacgtctagaggcggagccacaatgcagtctgacgggctgcagacgtatccggggtcaggtagacctgcttcgacattgcattccgaacggtcgcctgtgtgacgtggcttacagaggtacccgggtgcacagccccaggtatagtcgtctggcaacacggcggggggcgtgtaggatgggttgctgataaggctagggcatacagaagccggtaccgtcgtggtgctgctagacgtctgggttgatgtggtgccaggcccggtaacagtggctgtactaggtggaaggaccggtctggttgtttttgagtctgatggtgttagctgttgcgttaataattcatagtttgtgcgtgacaccatacctgggatagtgacagtatcggtaatggttgttgaatcaccgacagtcactgtacttccagggaccgtgacagttgtcgtaagggttgatccaggcaaagtgctactaccatccgatatagtcacggtggtggcaggctcagtaatgactgtcgtgacagtggtattggggatagtgacagttgaatgaccggtagtagtcacggatgttgtggacactggaacggtggtaacactttcggagctggaagtggttctggttgtcactgtagtggttgttggagtcggcgtctctgtgggggtggtagtggaaccatcactggtcatcgacgtcgttggggtagttgtcccaggtgagctgggggtagttgtgggtggtacacttgagctggtagtcccaggcacagttgcgctagttgtcccgggtacgcttgaggtggttgtcccaggctcgctagaggtagttgtcacaggtacgctggaggtcgttgtcgaaggtacagtggaggtggtcggcgtggcagttgagtcatctgtgcacgagcacgatgtcctggtaagggtcgtgtaatctgtgaccgtttttataggtccatgtccgggtggtgctacggcggcatttgcagaaacatccaccggtccaatgccaacatcggcaatgagactcagagtagggccgcttcgacaaccacttatagtcttggtggtagcctcagtgatagtaattgtcgtggcacctggagagacatttcccgtctgcgtcgaagtctccgtgatagtctcagcggtgcaagactcgccatcaccaagccaaagtgtgaccccaactgctgctgtgacagtcaatccatccttttgttctgtttctgccggcagtgcaggggctctgtttattaaactgccgtcacttgttgtcaccaaaccgaagacagtcgccaacagcgacaaccaagagaccgcgtgcttcatctttgcctgtctgtagaagaaattcttccggggataggcagaaggtaaacaagctaaacaaagaaaataactcgagggaatgggaagacatccaacgcatacgcacggcccctttgctcgatgaaagaaagcccaatagttcgaggctcaaaatcctccccagctgggcatcagctcggacaacttaccataggcccatctcgcgaacgcagtttacggggaaaatacataatattccgagcttttgcaattatgcatccaattggggcctaactggagcacacaatgtggctccttccgttgattcggttgtatttcccgtagctgcatgatccaagccatgcagcaatacaatcacggtaatgatcagaacggtcagaccacgagtttagcggtcgcacctgggcaatacacgtcgtttattcattcatatttctccttggccaagctgcttcgtatttagggcgggggcaattgacaacaaagaagatcaacaaagccgcatcgcaagtgccgccccccgccccctcgctttttgcattttgtcgacatgtcagcagtaagccagagccctcgatggaacctgttatttgcaaattgtgacaactcagtgatgagattaaccgcctatttcgttgaaaaatgcgttttcttttggggacgctgacgctgctggtcgtgatagactgcgcagtggccgtatgtagcacatttcagactcaaattaatgtttccatgtgcagttggcaaggcctgcgtggtaagtgcccttttatcattttcagacaggcttttgttttactgacacaggtagccaatatcctgcgcgacacagtctatctcgatggcgggaggctatggtatcagaagtatgaggctccccatggtcaatcccaaattttctctaacaattgcagaggatatgatgatggttgcgtccagccccagccggataacagtaggcacgaccaagtacatgttgagatatgtacatagctaactagaagcagatttggaagcaactatttattacctgaatcttacgaatcccttcaacaccaaatctgatttcatgatgctcctcagcaacatgtccgtcgccggcggttcagctagcatagctccgaattatgttgacggcacaatgttcgccaacgacaacgagttctatctctatgggttggtgtccctcatctcctcttctaatgagtcactgattctgagtcttttgttgcagaggcatgctttctaataccgggagctctgatcctcctcctggtaatcaagtcctctcctacgctgcgcaccagtatggcacctatagaagctcgtgggcgcccaactggaaacaagaatacctacccgctaatgtcacacgatacatcacgaatggtggtgccgcgtcggctccgagtgaaaacctaggcttttacttcagtgggatgcgtgcgccggactggggtgacttcaatttaaaccaacttcaatctaaccaaactgccgacacgctaatcactctggacatgtcagtgatgagcgacgggaagtggacgaacgacacactgcctagctacattcctactcgttctaacgcggaactggtctgggtacctgtatccgagtctggagttttggtggctattggtggagtggttgaacccattcagtttttccggaatgacaaagcaaactcatcacgaaccgccgagagccaaacaattagcccaacgtttatggagacggtttccgtcttcgatgtcgagagtaaaacctggtatctccagaacacgacgggtgatataccgccgcagttgaccgagttctgctctgtgcttgcgagtgcggctgatgggtcatcccataatatctacatctatggagggtacgatggcctcgactataacgctaatccttcggatgatgtctatatattgtctctgccttccttcagatgggtcaaggcatacactggtacgaacacacacagtcgcagcggtcatggatgtatcaaagtatatcctgatcaaatgctggccattggaggacagcatgtggactcaactcattgcttggagggtggtgtcatagtcaatttcaacctcaacaccttgaggttcgaggatgaatatgatcccacaaaatggagtaagtacaaagtgccagacctcgtgacgaaatggataggtggcaagtgagtatagacctggcagaaagcaaatcgccgtgactgacagctttattagctccgaaggaggtgcaaccactaccaccccatcgtcatggaccaacagctctctagagggaatttttggcaaaaagtatggcaagaaggtcgagacatattggccgtacaatagcagcaacagcagcagtgcctccgcacaagatcgcagcgggggcagcggatttcccaactgggctggtggagtaatcggcgcggtcttgggtctgctcgtgatcgcgatcattgccggactcttcttttatcgccgacgtcaccatcaacgcgagtctgctgaagctgaagccgaagctgcagaggctgagcctaagaaccgtcctgcagaatggatgtatgccagcggcccagcctcccctggacccgggccagtatcttcatcgaccggcatggagacggcggagacggtacggacgacgcagacctcggcaacgcagccgtcaataacgcagccatcgataacacaggcttccactgtgccagattccctcgtctcgcccgcgacccctggcacggtggaatctgggggagatgcgctgtatgagatgcatggtatgtcgatgacattattatttgttccccaccagaaaaatagatactgcggagtacttatactgacgtttaccagattcatcacctgttgaacttcccacaccattcaacaccgccgtcttcgctcacggcgggccccccaaacccgaacccgaaggtgggctcaaacccgacccgagacgaggctcccagtctcctgtctcgccgcagactcctagtgagacggattcggagttctcctattcaacgggccacaacaggcgcccatcgtcactgtcattggcatcgccattgtcgattgataacgtgatgagcggtcggtcgtcgcatttttatgagtctttcgatagtttggatgtccggcgagcaggtcatcgttctgagttctcccagatgactgatcatgcggaagagaaggggcggaagggaggtagtgagacgattcgggaggatgaatagcatatagttacttaatgtggtaatagcattttcgtatgtagaatagagacattggtcagttagctcgtggtgaacaattcataataaccaaagtgactggcagcactaaagtacaatcagaatacacgcccaaatcaagccaatatacttcgtctgcctgcattctgggcatattgacctggtatatctggcccccggccatgcgcagcacttgcagccaaagtggctagggatgcaggtatctcaaaatgcttgttgatagctgagctccgtggagaactcggttcccactgtgtgttaagtatattgactgttgctcgctcggcaactaacggtgatccttgatctggaagaatatgtgagtttggaaccacagaagacatgcactggcgataccttttatcaaaggttgagaaacaagagcaggctgcccatccccatccccagaaggagacccgtcacccttgtctcgcatactccatcttcgcttcgaccgtgggggtatagattctctcacgggcttgtcggcgcctgaatatttcccccgggacgcgataccagccccccagcgcaatctgatctcgtatcccccgcaaatgaggcccctggaacagcatttttggcaggctgggcgcgcttcatcgcactggatcctccttttcttgcagctccagcatcccttgaaggaacgatggcggtgggagatgtccttctgcttctcggtcggaggcatgttactgagaaactgactgggaaggcaaacaagaacaagggcataaatacccaggaagttctacaattcactcatatatactcatgcgatcgttgtgctatgcgcatcctcgcactgtgattggccgaacaaagatctcagtgagggaaatagtgcattctaacctcctatggggagtgctccccgagttattggcaaggagatgtttcaattaattgcctcgcttcttccaaaagatatctcatgatctgtgtgaaggggagttcagtttaaaagtcgatcggatttcaatgcgggcttgccgtttttggaaggtccacgcaggaaaacgaccttggaagtttgtcttcttcagcctctccgacatttctcacatttcaggggatcgaaatctgccctgaaagtgaagatggggcaataatcaactctgagggacaatatcgaggttttgcgaccgttatgtgttctgaacactgggggcgcagcagccacattaacccgactaaccccgatctcgggaggagttgatagctgtgtgtcacggaatcgggcatcaaagcaacttccccggcaatctcttgagtcggatatccagcacatcgtcaaataccgttggtatcgtcggcacttcgcataacaatccgcatctaccttccagagggggaatcttcagcctttgtggggtgtggggtaaaggaaaaaaaaactggagctctacacagacgtcaaatatgtttcgcctaatcgtttaaaatgcctccaggttttggatctactatgtgggccacgctcggtgaatctccagtagaggtgcccctctgtatggccacggaggccgatgcccatggggttccccaggagaaaatgacaaaagcccaggtcttgtgaatggggttgcgggacatccagtttccctaattgccccagtgaccccattcttggatccaatatatcgccttcagaaggagtatacagtatacagcccagagacaagtgcttcattttcacgacagcgttaaccacgttgttgggaaatgagtctagagtgattactctaaacacgtcctttatcctcactccaaactccccccctacctcactatggacgtggagaccgacgaaactctcaaaccaaccgaccaaagcactcaagatgccaacgacctcgcccaattcggccacgagcaaatcctcgcccgcaagttcaacatttggagcatgctagcgttggcattctgcgtgcttggaacatggtcgacctttgcacaggatctctccgacggtctgattaacggtggccctgtctcaatcctgtggggactggctcttgttgcattctgcaacacctgtgtcgcgctctctctgggcgagatctgtagcagcatgcccacagccctgggacaggcatattgggtctaccgtctctgggactcacgcttcggacgattcctctcgtacatgtgtgcttggattaatgttttcggatggtggacactggccgcctcccaaatggcattcatgaccaatttccttctcggtatgaaggttatgttcagtccagcctggactggtgcgtcgacggggtggcttgaatttgtcgtttatgttggatgtgtcttcgctgtcacactgatcaatgtgatgggctgtcggagggagaaattcctgccctggctgaacaactttgtcggagtctggttctttggactattctttgttttttgtcttgccctgcttatttcagtgggcacgaaagaaggtctctcgtaccagcctgcctctttcacgtttggaaagtggattaaccaaactggctggccggatgggattgtctggttcattggcctagtccaggctgcgtatgggctgactgcctttgacgccgttattcacctggtggaagagattcctgcaccccgcaagaacgccccgaaagtgatctaccttgccgtgatctccggagcggttagcgggtttatcttgatgatggtgtgccttttctgtattcaaacggtgaatactgtggtagactcgcccagcggcctaccgttcatgcaactcgtccaagaaaccgtgggtcagagcggcggtgcagttctaattgctttgttcatcacgaacggcctaggccaggcaatcagcatcgtcaccacagcatcccgtctcacctggggctttgcccgggacggtggactcccctttagcacctacctgtcggacgtgagtccttactggaaagccccagtcagggcactctggttccagggaggcattatagccctggttggagttttgttcctgtttgcagagacagttttgaatgcgatcctcagcgtcagcaccatcgccctgaccatctcgtacgggctgcccatcatgactctgttgctgatgggccgcgacaagctcccgcccggtggccagttcaaccttcggagactaggcgcaccggtaaactgggtctcccttgtgtattgctgtgtgacaaccgtcttctttttcttccctggcgcgcccaacccctcgggtggtgatatgaattacgccattggtgtgtttggcgtcatgcttgtcatcgccgtgtctttctggttcgtccagggcagtcgcacctatctcaacaccgaggagatgattcctcatgttcttcaggcccatacattggcgaatgatccacttcctgagccaaagaaggaagaccgatgataggtttctgtgaatgaagttggtcagtacctccatacagaatatgtgatttgcctggggaactcggatttatcaggttgagtttttggggatatcaatagggtatatatagacatagatgctacgtttatatagaacagctttgaatttgggttagacaaatgtgttatcgattgagtactcgatgagccacgtagagatgtagaaagagatggttaaacacagctacgtcagactgcatattgaatgcgagagtggtaggatccaggtactaggaagaggtatctatctgaataagagtgctgtgcgaggaagaaacaaccaaccttgctcatttcctattatctatcagccaccctacaaccctgcgagctcaagaaccgcgaacctttttgatagttgaagtgctaactcgacctaaatagcttttcaatttttactagtaactactaggacgtctccttgccatacctgccgtcactagccaagagtcaaacttgttcaaagatcttcgttttcgactcctcgatatttttcagtctttctagtagcgcctagcgactactagcaatatcttattgtcagacacctgacaacctgacgaccgaaaaaaatcgagacttttgagattttgacaatgaaattttgacaatgaacatttctggttgttactagtaataaccgatattagatgcactagttgtccaggggaggaggagtcaaggacgtttgcatatattccgcgttgacttcactatattctgctcatatttcggtgtcgttatggtcatcttttccagtctccaggtcaattaacaacctggagaggtgacagaatttgagggctcagagaaatcgataccagcgacctcctaggactatgtactacattgttactacaaattatacttctaacaatgagttattaccgtacataactagcaaggaagaagttgacctattcagattttttttctttggtcatcggtgtcatacgagggaagtcctctatttcctatgtacaatataatatatccttcctagattcaaaagcccctctagtcctgtcctcaaagcttagatttcatgttcacatgaatagccttaatattcgagtaagcagcaagaccggcctctccaagctcacgcccaataccagattgcttcacgccaccgaatggaatgcgccagtcgctatcgttgctagagttaatccagaccataccagcctcaatcttcttagccacgcggtgtgcgcgagtcaagttcgtcgtgaacagagcacttccaagaccataagccgagtcattggccatctcgatagcatccttctcatcgctgaaccgggtaatgaccacgaaaggaccaaagacctcctcttggtagatacgcatcttgggcgtgacatcggtgaaaatggttggctcaacgaagaagcccttgccgtcaccaacaccactaaaaggcttgccaccagaaacaagagtggccttttcagactttccgacatcgacataagacatgatgcgatcatactgagcctgtgtcacctgtgggccttggaaggtggactcctcaaatggatcaccaaccttagagacattcttcacctgagctttgaatgcctctaggaaacggtcgtagatctcgtcctgtactagaatgcgggaggtggctgtgcagatctggccctggttgtacatgataccgatatgggcccattcaactgcctgttcgagatccgcatcgttgaacacaatcagtgggctcttaccacccgtctctagggtggtattcttcaagtttacactggccatcttcataatttgcttggctgtggccgtgctgcctgtgaaggcgatcttgtccacgtccatatgcgaggcgagcgcagctccagcaacggcgccgtgcccgttcacgatgttcaccacgccgggagggaagcctgcttccacgatcaggttggcaaggaagaggattgagaggggggtttgctccgctggcttgagaacaactgtgtttccgcaggccagggcggggcccagcttccaagcagccatggcgagggggaagttccatcttattgtcacagttaaaagttggctttaagtactattaggggtgaatcggaacttacgggataatttggccacagacaccaacgggctcccgtacggtgtaggcgaacttatctggggttgtatcgatgacctggccaaagaccttgtcggcgtatcctccatagtaacggattgtctcagcggtctcggtcaggtcgtcgttgaaggaaacggagtacggctttccattgtcgattgtctcgatggtggcgagagtggcacggttgtcctcgatgagctgggccaggcggttcatcaacttcccgcggtcaatgccgggcagatcgcgccaacaggggttattcagagcagcgcgagctgccttgacagccttatcgacatcctgggcggaagctgcgtggatcgatgtgatttcttttgcagttctatttgaccgcccgtcagttatagaattaagaggtggcatccgaggttctgatttctcacgtacgtgggattgatgctggcaatcttctcaccagtcgaacatttgacccattggttgttgatgaacaatccggtgggctgggtccaagtgtggccgttaggggctgttagttgaacggacaagtcggccatgattgtatgtgctttgtactgtgagtgtcttctggcgagagaagatggtgaagctagatgagatgaatttgtaactaattcttaaacccaagcttagctataggaaattgcgataagtgcttcggctggacatgccattctaggcttatcggatgcatcatgatgaaggtaccccacagaaagatcgacctccagatttctgaggttcaaaacggcggggtgtttggtgtggatagatgtggatagggtacttactccgtagaggtgtggattaactggcgttgataggcccactagtcccaaacaggcaagtccacccatggctgtcgcattcagtttcattgttgtatagtatcttcaatgaattgctcttccgttcacattcgtgcaaatatctatctcttttctttttgctatatacatgtagtatggtgaaaaagatccatatacaatagaactgcctctatggactctccaagcccctccagggctgctgtggaggcttacatcatgcccatgtgcacggagtaaataagcttgatttaacgtcttggcatcgccaaccctgcccagccgccttctcccctgatttgtctatcagatcagatattttcggattagggtaggtctagcctagcgttgacccacggtcttttctacaagacttgccttattaggctggccactagcaaatgactggccaacacatctcgccgagccgttgcaatgcgattggccgcgattggccgaataatttcgatggcaaacgctttacgcaaaataaattatggcatagaatcaaagtctcagacatgttttatgcaaacacacatcttctccaggctttatcctaaatcgaacaacggctagagtacccactctcgggacctttcgctcactttgcccgagtttcttatatcgtagatatagcatcccgattacccgactaggaaggtacatgcgggcaaattcgatcagatattcaaggtccattagctatataaggactattcgcaggttttcgatggagcttctggttttctacaactctataactccttccttccccttgataccccttccacatcttcatcatggcgtctgcacctgataccgagtcaattcctggctacacaatcttccgtgagggagactatgaaagcgtcgccgctgctgccatgttgccgcaaggcacaccccacccgttaggtaagacatgtctctgcataaattccgagagcactgctaagtctgaattctagatcaactttctattaaggaaattcccgaggcagcgaagatcatccgggattatgccaaccccaagtctatcaaattcaactgcctcacactccgtgaaccccgaaaagcagagtaccgtgcgttccgtgctggcgcagtcccagctcctgcccgtcgcgctttcgccattgtcattgtgcgcgaaacaaacaagatcgcagaggtggtggccaatcttgccaccggcaaggttgaggaatggaaggacgttcacgacgtcatgcctaccctcaccctagaggatcttgatgtgatggagcgtgttgcccgcaaggatacccgtgtcatccgtgcctgcaaggaccttggaattatcgacatgaacaaggtcttctttgacgcatgggctatcggcatcgacgagcgctggggatacgaccatcgcctccagcagggtctggcttactaccgtagctctgattttgataaccaatacgcccaccctctagatttcagtgttgtcgccgacactgacacagaagaggttctcagcgtcgacattcgctacgtaaacggcgagcggaccgctacccctctcaaggaacacaactacctccccgagttcatcggcgacaagtacaaacatgatcgcctcaagcccattgatatcacccagcccgagggtgtctctttcaaggtccgcggcaatgagctcacctgggccaacttcaagatgcacgttggcttcaactaccgtgaaggtattgtcctttccgacgtgcgcacccacgacatgtacgaggaccgtgagcggactctcttcaaccgtatctccgtcgttgagatggttgttccctacggctgccctgaaaaaccccaccacaagaagcatgccttcgatgtcggcgagtacggcactggtctgatgaccaactccttgaagctgggttgtgattgcaagggtgccatccactatatggatggtgttatgtcaacctccaagggtgaggccgctgtaattaagaacgctatctgcattcacgaggaagacaacggcctcctctacaagcacaccgacttccgtgacggcacagtaatctccgcgcgtgaccgcaagcttatcatctcccaaatcatcacagctgccaactacgaatacggcttctaccacaccttcaccctggatggcacctacaagctagaggtgaagcttaccggtatgctgaacacctactgcatgcacccaaccgaaaccgctgctcccttcggcacggaagttgccccctccatcaccgcccacaaccaccagcacctgttctcccttcgcatcgacccggaaatcgacggccaaaacaactctgtcgtccagagcgacgccgtctcttttgaagcccccgtcggctccccagagaatccctacggcaatggcttctacagcaagaagacaccccttcgtacatctctcgagggtgccgcagactactgcttcgagactaaccgctcgtgggacatcatcaacccgaaccgcatgaacaccgtcgccaaaaagcccgtcggctacaagatcctcaataacaactgtccccccatgctcgccaagcccggaagcaccgtctggaagcgtgcagccttcgcccgcaagcccctctgggttactccttacaaggactacgagctcttcccagctggtgactatgtctgtcagtctgacggttctgagggacacccttacaacccgaccatcgccgactgggcgaagcgcaatgagaacatcgagaacaccgatattgtctgctacatgcagttcggcctgacgcatttcccgcgtactgaggatttccctatcatgcctgctgaaccggttagcattatgctgcgtgcatcgaacttctttgagaagaaccctggtctctgggtgccgccttcggctatttgtgtcgatacccagtcgaaaaatgcgttcccttcttcttgctgtgccacaagtaaaccccgcatgtgagggtcgaaggaacgacggcattgatttatggtatggtgtttgggaacggggatctttcagtgtgctttgtcgtacatagtaaatagtacatagtcttgccctttttctgttaatattaaattgatttttatcaaccttcccttttggttctgatcgattattgcattctaagtgattctatggagtttttctgcaatttgtgtcatgggatgtaaccttcacttcatctatgcatatgtatatgtactcataaaatctatcagacaagaaagcccagcagtcactatctccaagctcaaatgatgttcttcagctcctgcccagcaagaagccgtctaaggttatacgcaataagcgcctcagcctcacgcgggcgtccaccagcagcatgaggcgatagaatgagattaggcgcagcataaagcttcgactccttcggcagcggctcagccgagaaaacatccaacgcggcaccaccaatgctgcccttctcaagtgcatcaagcagtgcatcctcatcaacagaagtcccccgtccaacattaacaacccaagcgtggctcggcagcaacgccaagcgctcagcactaagagcaccattggtactcgctgacccaggcaaaatcataacaagggcatcagtcttggacagaatctctggcaagcgatcctccgcgacaacctcaaacccgtgacgtacacccgcactccgggcaacgccggtaacattagccccgagggcagtcaaaacgggcgcaagggtcttggcaatattgccgaaaccccagatagtaacattggcacccttgagggtacggaaagtgcctggggcgcgatcaggctgagcgccgcccagatgggcgggccactcgccgcgggactggaaatcgcgcatttcataaaagcggcgggcagcgttgagtagcatgccgagagtatgttccgcgactgtttcgtcgtgcaggccggagccagttgtgatagcgacacgggaagcgtcaaagcccgcagcgagcacgtcatttggaccggctgctagcgactggatccagcggaggttcttcatgcgggaggctgcgtcgcgcagattcgtagctttgttgctccatgttacgaggaactctgcatcgattagggattcggggattgggagtgtgacatcgtaggggtgcaattcgacggagaagccttccagtgactttgtgtcgaggtagagggaggttgggtagaggagtttcattttatgggcgggttggaggtgatttgttagagtgtcaaggcgttgtttgggtgaggatgacattaagagggtagtcaaggttcttatgcgaggggagagtgacaaacctgtggcaacgcggggtgtctcggcggagatcccgccgagaccggggtaactccgggaaagcacagatgagactgcggtgatcaatgaaacttatcaaattctgtctagttccgataaactatgtatagaacgggctacaggtattgaggtgcatacgtagttcataaaattcgtaaaataccaagtctagaaattcagctttagaggcgtactggtcataccaagttagcttatggctactgtgttaattaaagctgtgctaccctcgtcctctaactatgcccttgtccgtgagagtctacgtcattctctagggatcgcctcgagattatatggtaggtgctaaaattactatagggatattatgatagttaccggcttgttaagaattgtgtccagcagatgtgtgtccttctcataagagaataccaacttaaagtgaaagtggagcgtttctggtcctgcctaggctggggggatggctgcttcctaacttagagctgtgcgggttgtggctagctgatctggagaattgataccgtaggtggtcacgccgtcggcgcaacgtttgttcagggcggccagagccctgcccgggccgcattctaccatactcaccacgccatttctagctagagtccgcacacactcgacccagtgtaccggcttgtatagctccaccattaggtcctgcttgagcgtatcgaggtcggcagcgacggtggcggtaacgttccgcaccaccggcatatgcggcgtcatccactcgacgctattaaccatcgcagagaaacggccggcggcgggtttcattagggcgcaatgcgacggcacgttgcccgccgttggaacaacacgcttggcacccttggccttgcacagctcagtggcacgattcaccgcggctttatggccggcgatgacaacctgccctggcgaattgaagtaggtcacgctaactacttggcccttggccgcttcaccgcagatggcgaccacgtcggcgtcctccaggccgaggatagtgaccatggcgccatcattgagctctgcagttgcctgcatcagccgagcacgagactctatcaggcgaactgcagtgtccagcgacaagctgccggccgcgaccaaggcgctatattcgccgaagccgtggccagaaacgaaggccgggcagggaccgccattttccaaccacagacgccacagggcgatagatacagtgaggatcgccggctcggccttctctggttgatcgagttgttcttgtggaccttcctggacgagtgcccacagattgtagcccagggccttagaggcttccttgaaggtctcgaggatcaccggattttcagcgccgaagtcggcaagcgtgcccattgatagggacccttgaccaggaaatacgaacgcgagggacgtagacatgattgaacaagcccttgttgtcttgtcatcggatggggtgtgtcgaacacaaggctggacgcggaaggtgaagacttgggtaagagcgaggaccaaacggtcatatttaaccacttcgagacgaatctgcagctggcaaaaataaccaaagagcgggggacaaacggagcattcacaccaggactatgtcgacaattgtccttgtctgagattcacaatttgtcaacctctttgcgtggtggcccgtgtcctcagtgacgtctacctatggtcacaattaccggggagtccaaagtccaaaagctcgggatgtcacgtactatattatgggtagacgagaggcactcgagctcccctcagatagtaggtagatagagacaatgtgcacaatgggtatcaatcaattcggccacggcctacaaaaaaagctatatagcaaaagatatacacagaaccagaatatatacgggggtatcatcatccccagcaccaacttcccacctacgacgcaccgtctttctcaagaggaatctcgggatcaccgtcgacggcaccggtgcccgacaaaaagaactcgagctcactaggcccaccctgcgagttctcattttccgcgagctgttccagtaagctcagaaaagggtctttctcagatgtgccctcactaccggttgtggtgtgggtggcactagtttgggactgagcacctggtgtcagggcagtgggaccagattgtggcattccgttcatatttgcatgggtggtgtcgaaggggaaggttgcatattgtgggtttgggggcggtgttggcgctacgttgagggaagcgtcggtgagaaaggctggtggggagaggccgaatgccgagggggagaagcccggaatggagaggtgggtgttttctgatgtgccggtgccggataggtccgttccggttggaagggagaagacggagggcagggatggtgattgttggtgttggttgctttgaattgcgtggaattgaagggtgggcgagagcggggccagatgagagggtttctgggacagagaacggaaatgggaatgggagttgcgacggtctatatctgagccctgggtggatgctaatggactcgagggcccaggccgtgtacttgagaagtaggacgaaggattctggtatgacggtccggcggttggccgttggtagtagttatgttgacgatcgatgaagttaacagtactgtctctagagttagtgatcatacgtataaagaaaggggtggtatcagcaggcgacccaccttggcgctagatcatccgccgcatctataagccgaacgtgtgatccatccaacatcagaccgggatatcggtcgaggaagtcttcgagatggaaaaccggcgagaaacgcattgagctactggcaaggttgcgcaccaattcagagtgacacgtatagatagtttggagcagctcacgctgatgctgcacgccagtccaaatattgcgcagccaagcaagctggttcatctcccgagtcaggaattcagcactagaagagaaaacctccccttcgtggcccttgtagtgcacgccgtgaacatgcacagtccccgctgtacacacacagtagctgacgaaagcaggccactcaatcagcggagaattacgacccagttcaactagctctgcgatggcattggagtgcgaaaagcacaagttcgttgcctcgatttgccaagactgatgctgccccgtgcctcggagctctaccaggtcaattggtaggaatgggcggtagatcaaacaatgcaccaaatggtagatcagcttgctcagcaagagtgttgtactctcggggtggccgaacaatgcatcgatggacgcaaagacgtcctgtgtaccagccgcccaaatatctagttcctgtcgtatcttggatagattagaaagcgcgtgccatgggaagtgagagtcgcctttgactccaccagctgccagatacttattagtgacaccaagaatacgcgtgatgtcaatcaacaaagaggcagcacttggggattttcgtctggaatccgcagaatattgaatgttcggaccgacatggaaaagctccccctccatgtccagaccagctgcgtgtggcgaccaagacggtaggcgcagaacaaccgaatgatcagtgatcagacatggacgccgagatccacaattgataaacctgtccatcaagtaaacagaccagaatagccgacgtctcatttctcgctcagcaggtgtgatattaggcttagagggtgcttcccggtacaaatctagggcgacgatcatggccacgcaatttgctgatcatcattagtggggtccattaaaccatgtcagatcgcgaggaaagcatacagaatgtcatgtaagctttctttcccaacccataggcgtagaaagcttgcgaaaccaacattagagtctgcagtccttctactgtaggattgtcgatttcaatcatgcgtcttgcttgtagcgctgcatcaagcttggtacgtagtgactgctccacttgaccaggtaaggttgtgtatctgagattcgtcagtcaaccatataagcatgtgacaggacttgaaagctcggtttttacctcactgtcattgctgagatagccatggccagacacggcggcaattggttcagttgatggtgttgtcgcgttgtcgcctcgtctagtacataaaatggcttaccatgcaatcgttcaaagtaaatgtcaaggattgcatccgatagaggtccattgtttgttggagatggctgttgcagaagacttgctgagtggtctgccggcctagggaagggatccacatgttgcgagagagaagttggcagagcggatcgatcgcttggagagtaaatattaaaggagttgtctatagtgttgcgacgggtgggaaagctcggcggatcgtccggggtatcgggcgaagtgggtgaaatagggttcttttcatcgtggagtcgtttctccaacccatcgacccgcttgaggagagcttctagcacatcggtcttgggccccctctttttagggacggcatcttgaacataagatcaacaggggaaatcatgtgatgcggaagagaaatgattaacataccatatacacatgggcattggaagactttacatgcctcgcagctcggtcgcatgcgattacatttgatctatgacaagttagacacatccaatcgcacctagactgactggacaaaccttgcgcttgcgacaggacttgcagttcatggtttcgcgcggctcgaccgtcgcacggcggggcgtgagacggtcgatgctgacctgaggacgagacatggcacatctacatggaagagagagatgagaagaagaaagaaaacggccccggccaagatggataagaagtcaggcgcatggctgtggcgttaaaataaaagggaaagcctataccacgcacagttgcggagagaaagaaatgcggagaaagtgatgtgccgccggaattccccagtttgggctgacatggggttattatgtccttgtgttttaattacgcatgatttaggctattaattacttgattataatatcggaacccctatattatatgtgtatataatgatattcttattcttatgaaagtttactctacttctaacatcttcatctcagaaaccaatgctcctcccctttaatctgtacaagttggcgggataggtttccgtttagggaatacatccactttagggctccgacggccaacatccgagatgatctaggtaccccataaattgcaagtaattgcaagtaattgcacggaattgcaatagcttaatatattcggtaatcccctatattctgcccatgtcatcatggggttcttagttgccgcttagaccccgattaaggctcctcaaattacccgaagtgtctcctgcagaactatcccaagtctctaactgcacgtactccgtacaatatacagagtgtacatgtaggatgacgcctattccagcctattccagccttactattggcccccgcttattacaccttctccctgaaatccgttcgatcctagtctgatcatccactgcagctactgtattcgatacggaacctccaccctagtcttcttttaagtttctgaacagttctttgtgatctcgtcaggttttacggagaaccgtatgtatctactccgtacaacattctaaaagtcgtgccaagcgcgctaacataggtatgtactccatatggatgagtgggcctggcatcattactcgacacagtataacctccgtatgcctcggcctaatcccaacctcactgcccaggcaagaccttccctctcctcacaaactccgccatctcccccgccgttccacccatcctctccaacccctcaacaacaccaacccgatcattcaccggccgttcctggctaaccttaaagcggccctcgatccgcgtgatttcaaccctcatcccaacaatattcttcaaaagcacagcaatatactctggtggcgcatcgctgattttccaagccggtctcggtctcggggtaggtagtgccgagccgtcatcatacccgctagctccggtcgccctcttcgccccctgactcaggcctcgatctgggctccagttcttgttctgagtttggggtggatccccatccccattctcaattccacttccatctcccctgtgtttgacatcagatcccggacccaacccagactcatcttgaaagcccattactccttcctctccaagccgggctaaatcacccagctgttgtcgtagaaacagctccgtttgctcatctttcgtgtcatggtatatagtcgcccgaccgtagacctgcaccgcggcgtaattccacgtcggagcaacccttcccgtggcgggtttggactctgtgtagaagtttggggtgatgtagtggtctactgggctggtgaagacaattaagacctcaccggggagagtgtggcctgttgatgtcgctggttcttcttcagaacttgttacgggaaatgcgcccgggatactggttgttttggtgctgtactctgaagcagattctaccattgctttgctttgcgggttttggcgcgcgatgtggccgcggaggactcccatggggggttgtggcggtgcgggggtgctgtcatcggctacttttgcttcctttgcgaactcgggttcgaaggccgtttcactgtccaacacccaggggatgtggctacattggagggtcgggtgattctccgaagggagagaagtggtgaggacgcctagtgggtgttgtttgatgaaggcgtggagggttgggaggtctcggactgcatgatcaggacgtaggtgcatattcaatttgtatggattggatatgtattaaggctaggtagaccctgaagagaaacaatgccggggtaaccttgggaggaaccttggaaggaaccttggagatgaggggttgaccccggatttgtgataaagttccaaccttggaaggttccaaggttatatattccatggattccatggatggattatcaatctatgactccaaacattaagatggcacaagggcagcaacggaccaattaccacctaccacctgctaggacatcagaaatactcaagtgcagctacacaaaaaatatccataggcacaataaataaagcgccattccttatacttaaactgccccaaacccctaaaacaaaattgcgacccaacatcagcatcaaaatctattgcatcaacaatagacaataaaaagcgaatgcgaaccacaaattacctacgtaggtatgcagtgtactatatgtactatataactagaaaagaggcctcccagacgccatgcgcacaaagtcaaacggcacattctgcccaacaagcaacctcagcgtctcaacagtagtccaagcactaacatcctcaacgccatatgctgtccatccagcacgagtggccacggccaaaggatcccccttcctcggcccactcgtaagatcaagataaaccctcccacgagtacaaggcggcgagcaacgaccattaacaccataatgtctcagcaaaggctgcacgagcagcgatttctccggcggcaatgcagagacaataacgaagggttgctcaacccgtttgacagactggatggatgtgaacggctcaagacccgcagcgagcgggccactcgctttgaacccgactgtgtagatcgtgccaacggccagactgcgtagtgcgaagatcgccgctgaagcgtctgcttgggagctggccaggatgatcgctgcacggctgctatacgcggatggaacgtattcgcgcgtcagggttgcgcggatgcccttccaggcggcgttttcgccgatgaatcgggatgttcctggtgcggcttcacccggtgtcatggcgattgtgtcgactaacccgattgcgcgggccgcgtcgctggctgcggggatgaaactagttgtggttggaactggggggttgaggtaggcaccaccgaagtgcggttggacgaggacggattccatggagccttttgggccgcggtcgaccgaggtgaagttgtgcgggaggccaagttcatttaagcatttctccatgaacattgagtgtggggttgagcggaacgagccaatggcgtagagctcgcgtttggggagttggcccattatgtgtagggcttcgttgatctccgccgcggttagctggcctggggcggcgatcattgggaggagggggtgggtgattggagagaagacggtgttaagagctcgagatagctggcccatttggcccatgttgacagctgacagaggtgggcctgcgccgcgggttttgatggtagagcggaagtattctagttcgtagttctcctcgatggtgtggaccatggcgatcatcttcacgatgtcggcgtatttggcgctttccgtgaatatgcgctgcgcctcttcggacgtccacttccacgtcccggagaagtcatggaacgcagataaaatcatactatggccctttttctcaaacagctggcgccggatctcctcgggcagccacagttcgacatcgacatactcaactccccactgtatcgcgcgccgcaggtacttgtaaaacagcgctgggtcatccatcgggaacttcccattctcccttgtacaacggacagtaaagataatcggcaactcagtatgctgccgcaacaacatcaactgctgaccaacatacttcaaactcggaacaggcggagttgtccaacccttcggcacaggctcaaccagcaaatccacacggatctcaacggcgtcagatcccacagaaaggatatctaaattcggcaaagcagcatgtacatcaggaaaagtagtcgaaatgaaattcgtcctggtcttcgttcgcaaatcatcatgcggcctcgtctgaccaaaaatcaaagacaaaaaccgcgacagatcccgacgcaggaacggactccgcgaatataagaattcatagtcacaactctcggtgagcgagtcgtctggcgtaaacccgttttncacacagtacgtgtttaccagaaccagagatgatcgctcgcatccttccaagctccgcgctaggtcgtgcgctagtatccccactaccgctgcatagttggctcgcgcaagcatcccaagcgacgcgtccgttgtccatggcttacccagaacctccgctaccagtcgtacaatatgctcttggtcctgaccgtagatgatcacgacagtccccgcggcagtggcggcggccggcgcggcgatgcccgcggctgtctggtctgtgggcccgctagctggaggagcgagagagagggttgttgtagcattggaagggccggcgatattggggtttgtaccaggaggatcttgggcttttagggcggtggagacagggggatcgtcgagcagcggcgtggccatgtgctgcggaaaggctgtcggaatcatggcatagcagtcccaagtgttttcatacttagttctcgcgaggatttatatgcaggtcgaggtatgggttaggacgggtaaagatgggagttggagaaggggggaatgagcgcaaggaccaaggagagttttttcaattcgcttcttgacgctcaggacccgggggtagcgtgccaggtaggtagtatcagagcatgggatattttacaaagcgcaatcagggaaaaagggagcgggccgaacaaggctagctccaagatatggggtatggaagaactcgtcgcggagattccacccaatgcccgccgatggaatcccacgcagacggcggacgcggggaaaagtgggcgcggagttgggtttctccaccaatcagctgccgcgaacgcagaattatactacatatggatttgttagtagggatcctactcagtagaaaggtgatatgtgatattacagtaatgatatgcttataaatcctatcaattaccagtggacatctacaaatgcatgtgttaatatcggccttcatgaaaccaccatcccagctggagggaccggcattaggctctgccatgatccgatacgagggaaagcccaccaatctaagccggcgtctctgactcggccggagcgaatgatcggctttggaacagattttacatagcctgttgtaccttaggtacccggggggggataggtaagcaacgatttagacgctaggattggtggaagagcacatggatacttgcgcaaggggcaaaggcgaagattagatggtcccatattaacaacgtacatagtaaaacgaccatctattcattgttatttctgtcctcgacgctggcaaagcaaccggaatcatgtgacagctctaatcggacctgggaggaaaattataccggagatatgtagtcgtgaatcacgaagcataggtacaggtgatcatttgacaccgcaaacatgtgagatatggaaaaaagaacgacagaatcgcgactagatccgcccagcatcatattccagacaaccaattaagacataaggagagaaaaataccagccaaatcaagagggggtattgggtagtaacaaggctctgaaggaaaacaagaaacgcaggccgagagataagacaggggggaaagggcaggaaaagcaaagaggcattggtccagagaagaaacatgtatgtatgtatcaatatcaggcacacaaataatcatcatatcgcttggaaaaccgagatagcgcttttaggggattttgttcatggctccgtgcatcgagccggagccaacactatgtacgaggacagcaatacaaccgatgatcggcgcatggactgtccgacatctttcaagacgtcgcgtgcctaccacgacagagcatggtaggtcgagtaagggagataagttcaagcgggagagaggccaaaggtgtacaaccacacatgcagcgttccatttgtgggatgatatcgggaagcgagagttgagccgagccagcagcctgtaattctcagcttggatggacacacatgcccaaactaaaacacgcagcaggcaatatgcaatcccattggctcgtcgttggataaagcatggaatgggcaacgccatggacaggggaaatcgggacccgagtcggagttggaaaggagtttcatgtttcaggctcgcgcagagaaacagaaggaagtgtttcgaaaaggtggacatggcacattgcccgcgcacacaggacccacctgcaaaagggcaggggatatcgagaaatgatgtatgggtcactcgcgggtggaatcgcaccaattaactcggcggagagatggcgagcccgttcatcattttgggcagcggctttctgcgagcagtatttgccgtcttggagacccgtggtgcaccatggatcatgcggggttctgtcatcaggctggtatctaggtgtgccggtgctacggtgaaattgtcagtgagcggattggattgagggtgagagctttcgagtgtacctcttgtcggaagtctaccgtaatcagctgaaagattctgctggctgcggctgttaggggcaaagaaggtagcgttggctgtgcgccacagatggttcgaggtgtctgagaggaagtctgttgtcgatcgtccggagaaaatggacgtgcggccgcggttgcgctttgaaaggacaatctcgtcgaacagggtcatgcgcgggtccttggacttcggatttgttcgctcacggtcactgatgaactcattgaagcctagtattgcgtcagtatttactccgcaatgcaatacgggagttcgccaacttaccctgtgtctgctgcagaattgcaatatactcggcgtgctcacttggaaggctcttcatgaaagcctccacgttgaaattgtaatgcatgccggacttcttcttatcaccactggctggcaggaggaacttcttgtacgtgtagaacaagctagcaaagcatctgacaaacgccgcacgaatttgatccggatggaacgctgcatcacacggcagacacaccatagaggtgcagcgactgtggactatcagtttgcatgcagagcacttgtacatgttttcctctgcctgttcatcacatatggcacaggtcaacttgtcatcccagggttggacttggaaatagtgaccctcggcccagcaagtatcgtcgttattgccgacgggctggtacgtggattgagggacaattgtggacgcagcgatggtagactgtgcatacacagacggtgcatatgtggatccgccaccgtagtcagtgttgagagttgtcactgaaagattcgaagcatgacccaggaacggagcacttggacgtcgactcattccaaaggacgagcttcgacgcgaggcggcatcgaaatgaccggaacgcttctcgcgcaaggaagcttgcaatgccataccggagtcattgcgagagggggctagtggaggagggaagaaaccagaagtaggcgagctctctctcggggatggcggagaggcactagctctcatagtggagctggtcccgggacgctcattaccgcgagatgagtacccacgagaggagccgccctcgtttcgggcgtgcaggaagacgttgaagatcgggggtgtataggagcctggcatcacggctgttgcaccgaatgcgctagagttcagaccgacatatttcgcgagattagttgcaggcgctttggatgtgaaactggccttgctctccgacatgaatgagtcccatgggtacgtctcgatggcatatgcgggaggcccggtggggacgtggcatcgactgtgttgaggggcagctagctgcagcaaggagaggagcttcctgcgctgatgacgtgggagagaggtcggttgaatggtgctttcgatcatattgttgtctaaatcaaccaggacaaagtcgtccgtgggcagctccaccttctcataccgacgctcgatacccacgatgtatgggcaaggggcctcgagagcctgaattaagcgcgcggggaggacaggaatgagaacgcctgtccattccagagggaacaaaagatcgaccaacgctctggtggcgagatagagcatggaggtgtgggaagacaagaagatgatacgggattcagtaagagcgtactgcgtgttgttagcattgtctctagtcaacttacatggcaggttaagcttacctcaaagagaatgataatgttgggaactgacaaagtccggaataaggcatagagatcagtctggaaatcagtcagcaaaagtctggagaactcaatcaagattgcggtgcacatacattccgagaaccagggatctcattgggcgcctctttgcgtgcgaacaagcgcaactcacgaatcgcaatctcaacctgagtcttcgaggatattgggcagaaggcttccgtgcagagattcatgacatatcgctccaacggctgccatatacccatacgcggcgagggcggaggcacgtgctgtacactgccctccgtcatgggcaccaccacggccttgagccattccttccagaagctcgtcatcgtgctctctcggcccaagataccgtacgcacggggaatccagaacccagtgtccccatcggtcaaaccttcgatcttggaggctgcgccgtgccggactggacggaggagatcagtcattagcccaatcttctcctccacggcgctgatatcatcttcgagctgttcgcgggattcagatcctgacgggacagtcggcagctgagctaggagccgggataatttggcccgctctgatgccaaccgttcgcctaggcttgcagccagttcacgctcttcgtctgtcatgttgtcctttcgccattcctcgcagcgcttctcgagctcttccgccgcatttgggttgaggggtatccagatgagcacacagatggcgtgcagcctagatccattgtccgttgtcatggcgaatccgtgccaggtagagcgcggtcgctggtcagaggagacgatgttgacatcattcggaaaggcaaacatagggacatagtcggggaaattgccgcgctgcttcatctcgtccggcatgccgcgcgtggggtatcggtcgaggagaacgggctcgaatcgccgtttcaacggatgcattgtgggggatatttcgaggggttgaggaaccgggattaccgagttgtagttgctgagtcgccgagaagttcgcaccgaagctgaagacagttcattgtcagccagtgcatctagagaaagttccggccacaaacccgttccagagtggctagaaagtaaagtcaaagaacagttctcaccttgacgagcgattgacggctgtcgtttcatactattcatatcccgaaaggatcgtcgcacgctcccaatacccgacctcagcaagttaccgccaggcgaaggcgaatcgtcggagacgatcttctgcgtacgaaccctagatcgcgggcgggtattcggggtaatagcgccagcgctcaagcttaagtcggttaggaaggattcccgctcgttggcgaacttgaacagcgcagagtcgaaatcgaagtcctcagagaacagagccgaggcacgcaggggcgaagaggcacccttgacggtcatgctgctccggttactattactgccagccccatttgttccctctgaggttttggagagcgtggataatcgttgggcagagcccctgtggctagggccggtgaatagcatggagtttggccgggagaccccatccgggttgtgttcctcctccgcatcggcatcctcctgaattgtgtcggcgagcgcagggcctggtgatgcggcaccgttggcacggtaatcttctcccaatctctggaaggtgtccaggatctcagtaccatccacgccggctatccagaagtaatcggcgagaggggcgccttcggaggtgcttgacgatggcattgtggagagagtcgcgggggactgtagcgggttaatgccttggttgtcaccacatggaccgcagtatttccaggaaagggaatgcgcagtggaattgagcgcatgtagttttcgggagggggatgataaaaatgggggagaacgggagggaggggcagttcagagcgaagatcaattttggggggtttgaaggtcaaacgtattaaaaaaggagttcctggtttatctttttatttgtgtattctacgtaatcattttctacccaaatattttccctttgacagtatttctgtctttatttttaaagggaaaaaaaaaagaaaagaaaagaaaagaaaagaaaaacctttcctttccttatattttcttttcccccctagaatcacgggtggttgcgtacgctaataatgttactagaactcgaggacatttaaatgtgtgcacatctctactccactatataaaaatggtaagagttgcccgtgtcaagtccaaacgtcttaacaaatcaagccagtcaagggcccgggccattcacagccctagcatctatgcacaagagtcttgacaccgtagcctgcaggtatgtgcattgggtgggctagactctaaagggaatccagactccagacttccggggtatacccataatacaggttcattacatatgtatacatctatcaactgggtgctattctcctattgcttgttaccgtatatagacaatctctagtaaccttggaataatgttaagaaatcaggaaatatcaaggggttatcccgtagaggcccgtgatccatggttgagcttctgatgcaagcgggtcttggctgatccttttcttaacgaggttcgtcaactaactagtacggagtacggagtaacgagtaacggggttggggttgattgtttattttcagttgagacatggcgttcacgtctttctatttacgggactttaggggttcttcggcacgccacaatgtcattcttttttatatctgacttttaagaactatcgacaactttcagggggtaagactatcgggaactgccgacgtcgggttgtaaccctttttacagtttagttcagtttagttcctcgtgggaaccttgctttttagattgtgtctgcttcaacggcctttttctttccatcgcagcaatgtacaatccctccgtaccctttcttctgatcctacaacatacaacatacatgggagtgatttttcgtgcatgacacactagtctatgtactttggtacataggatttgaagccaggagtcaccaagtggggtggcttgtcccggggagatgatcaatactacagttggacaatgtggagcaccgaggggtgaaagcatcgcttaagtgtatcaatttccacagtatccatttcataaaataaccttgcaaaaataaaaagtaatctggtaatctgatagtctacgtagataaatcccacagttcgttccagtgtcaggattcccctggatccgccaaggctctcgtacatgtatgtatggaggtactcctccgtatatctctaatatgtagctatttgggtaccatcctggacaagtaaacatacacgtggaactccaaagttccaatatacttactccatacggagtatagtgtatcgaaatacaattctatttaatgccctagacacgcctaatacccgcgttacgtggcacagggcctcccctgcaccgatagcccttttcgactggtcgcatcccaggattttgggcaaggttattcgggccatctccccgtcgatgtacattcgtactcacatacagtcaatgcagtcaacagtgtgtacgacttgacaagagaagaggcggtggagcagatcggcagacagtacggagtagcctaaacttcgtatattcaccaaaaacaaaaaaaaagaagaagaaaaccaatagataaaagaccgggagtaaaactaaaatagaagcctgtgcgagacatagattgcggataatgatctttcgagatcgggcatgtgaacaggctgaaccccattgatcagccagccctggagccctggagagtctagactcttccaaatctggctaagagattttacatgtatacatacccgaaatattgttttatgtgatatcccgtagaatacggggccttggcccgaggacgaattgtcgtttctatttattgacatatttatcttgtgcgagacctatagacaaggagtagtgaaatgcgcggtcaaagggtgcaaatgtccagcccggagcttccttgccgagagagaactgccgtgtgacaaaattaagcgttggctgcatggcaaggctggtttccgctccgtgctagtggcgccagcccagccaatgcatcggactctattctagagcctcaggcagtcatttgtcggacctacatagattgtgtggacatattcagaagcccatattacacgatacaatcccccaatttaggacgctgctgccaatgccaatggtgatattgtgtaagtgggacattggaaatgcgtacaaaccgcccttgcggcgccctccatgcaaccaggcggctggatgcactaatacaattcggcgcccatattgtgctacaggggcggaaacgatccggtgggttcgttgcacaccgcgtttcaggtgcgtttccggctcatcaggtttcccgtggtcaggaaccccttgtcccccatagcaccgcgccattcaattgacaactgacccagcgtggcacgaccgtcccgtcgcaggtccttctggagagcttcaagtccctcgttctggccctcttcttgttccaccaaaaacgccacctgtaggacatcccgtggattgagtgtaggtagcgcccgggttgacatgtctgtgttcatcatgtcccaatttagagattttgattggaacggtggcttaggatttagtttcgtttgctgtccatcccccgatgttagccaaatttttgagcattccgacccaggccgggtttcagacacagccgcgcttcgttgtgaaaaatccaccgattcgctaggaattaatagaaaattcataccttgactaccacggcgccttcgcccacgttttccagttgtgcctctagggcaaagcggagtaacctcgttttcccgtacggaccgagtgacttattatctacctcgagcggcggaagttcggacgccttggtccgcacgctcagacagggctgtgccacaaactggtataacttgcggaaagtcctgacccggccactagctgcctgcgaatctgagccgatctttgtctccgtatagctgacactgacagctagtatgtggtttccttcttccttcaaatcaaaccgcacgatcttttgtaatgactcgccgatcttgaggccatccgttgatgcggagtcgctgggtggctccagctccagtgccgcaactgaggaaggtgtttgcatttccgctactatacgcacggacgtgaggagtctgtcatcatcatcaacattgatttcattgttcgcgctgagtgtgcatccgaaggtctctccgacgtagactgatccgaaggagggaggtagagtaagctattgccattagtgaacagtttccttgaggtgggtagtcactgtctcacaagaggcgttaaaatgaattgatcatcagaatcactagacggatagcttagtgaggctttcgtggatattttggttttagacgtcgggagaggatgttgataagaaagtgatggccgcgcaaggctgtgtatcgatagtcagaagctgccataaacgggacgtatatgaatcattcgaattaccgcaacactaatccgttcatgattagctcgctagtccaactactggttgagttgtattcccatacctttgagagagaccgcatgtggttccttcggggcatcagcccccgacagagcccgtgggcgtgccatggagaataagttccaatattagctccagagggggaaatggaggagtaaagaattagctgcaatgctgggagatgcagtatagcgtcatcttgtcgaagagggacagtccacttctccacgagctgatagcgatagggaagctgccccaaacaaacagtgcaaacacccgctctttcccaaagagtgtgcgactcatacagtcgtacattcaatctctttgtttctttgtctctttttctatatgtatgtactgcttctgactcgcatgatacattctcagagaattcagcatctactaaatgatgggaaaggagcttggagtatatagggctaagtacacacatttaccattgacaagccttgtacatgatataggtttcctacctacctaggtaggtaccctctacaaactcttgtattcactatcctactgtgatagactacagtggtcaaaacagattgaatcgtgacaagccatgcctaagcgaaagtgggaagcatgtaacaaacatgacctacctgctgagaacaaaggcctgttatatctttctaagtctccatgcaaagtcattaacacttcacgtgtttgccctctagatcgtgctttctgcaatacatatatagagcaacacatcctctttccatggtcctctaccttcctagaatcgtatcttctcgtactcttaggaagtacccatgtcccagagttactgtcagactacaagtaatgaaacgttcctcttctcctgatttgccatcaagccctgatattcttgaccccaaagccaaaccccccatggagcctgttagccctagtaacaagcttgttcctagagctgagaactcaatccaagttgcagagcgcactccgcccaatgccttccaaatactcatgtctggaaagcgcactctaccatggctagcctcaccccccgacgggttcttagcaagagtctcgcgcactcaaactcaagtgcaagtaaatattgacggctatggcatacttccactggctaattagcttccgtttagcatgtatatgattagacacaaggttggcggtacgcaggatattccgcaaatctcatttgaagttgttggatctactggcaatatctacaaaacggtcattggcaaggtccctacctgtgactgtccggatgtcaggtttcggaagacgcagtgcaagcacatctgctttggtaagtatcaacctagcccgggctccgaagatacatgcctaccccattctgcacagtgcaaataccagtctctgttctttgctaatgtgttgtaaagtgttatctgcgatggatgtccccgagcaactgatgtaccagcggtcatttttgccatccgtgagtcctcgtagaccctaacacaacatcactttgttatatatccctgacccaaacttgcatccataaggagctacgcgcaatgcttgctgtgttatccttgaaacggaacttggacaggactacccttgcttccgccggcgaaaggaagcctgtcgagggccagtgcccaatctgtttccatggttttgagacagaccagaaaactacctggtgtcagtcatgcggcagcaactttcatagggcttgctttaagaagtgggaggctgctatgcgcacgtcccacactgttgtcaattgtctccactggtaagtgatggcaacttgttcaagtcgtaataggaacttcgaactcaacagctctccgcatatagcaatgccccgtggcagactgatgaacatggtacgccccatctcaacagagaggtcattcagaccaagggtgatcataaccgaggcggatatgtgaacatgggcggcaagtagtccctggttgtcatggctcgatcagtatccttttgcccttagagagtctatcccacgtcttgacttctggttcccctactaacgattgcttcttgggatgacatgggcgactcgtcttcatatactactaatcctatcgctgtcaagtccaaaatactgaaatcaagacgcgacgaggatgagcgtgttcggcatgaaactggaggtatcatgtctgcggggacgtaacatcaaggaacggctctgttacggaaaggtctcttgttgtggtctctttttaccaattcgcctttgtctttggaaaattgtgttgggaagtttttgttccagaaatctatcattgagtgacgtaccctcctgccggtgcaagcccaagcaagcatggattacttcattgcaccgtctggaataaggggagtcaacttgtggtgctcttttatcaatagaatatcttatgcatgttgtggggtcaggaatgtagtattcggtgttagtatgggttgaactgttttatgctgaatgcactaaatgaatttgatactgttctttacaatcttcagtgtcgaacgtcgactacatctggttgctactacactcaatcgagatatctcacaagattcacttttactaggaaagccaaatatgacaaaagaaagtccattcatcccaactccgggtatcacatcaagccccaacggccaagaaacgcaaaaagaagcaagcttctcaactcaaaatccaataacaccaaacagattattctatatatccttttgaagccgtcggcccagtcgaacagtcgcgacactaacgccttcctcgccagtcatccacgacggcatacgctcagggtcaacgatgcctagctcagcaagtttgcgaatcccgccgatgacgtgggagccagagaaagtcagtgacaaggcaggtggcgtgaagatagaatcatcaacgtcatcatcatactgctcatcactagaacccggtttgtcgaggagccggatatcaagtcggtctagcggtgccggggcgagtgatgaccccaatgtgccaaatcgggagtggatggccagacggcgtttcttcgaatccggagaaaggggggctgtatcaataccgctggatcttcgtttggtcgccgggctatttgtgttttctttgccttctgttgggccggaatgactcgctcggatatgctcttcaggcgatactgtattagagggccgagggtccaatggacttccttcagtggctgcatctgcaaagatgctaaaggcgccattcgaggccgttgatcgtccggggccacggagagctaggagcgtgggcagattcttggctgccagggatgtcgcctgcagagagaatcgttcctgtgggcgggataaagctttggggatggaatcgcgcaccagacgctgaagggttcgagtatcagtagccacagagcttgtggaaggggcagattttgatccggtggatgttgctatggaagtgtagacgtaagggcaactgtccgggaaagcgacgtagatgactcgggacgagtcagtgaagatctcggctgcctgtctgggggactgatatggcgagtcaacaacaaagatacgcaggaatgtcagcggcagtgtagccgagtgggcgaggtggtagtgggccttgaccaatggggagatttctcgttggaggctttgcacaaatgttgccgattgcatgcgcggtacagaaccggaccagtcagtgggtggcagaccattaaagttcttgcgctttgtatcagtacggctaagctcgagtgcagtccatcgaaggctggcggggtggtcgtccatatagcggaggtctgccatggccagttggcgcagtgtaatcccatgccgccaatcgccttctaggattcgttcaataacctcgcgctttgcaccctttcgatcctgcagatcttcatacgcctgacggacttcttcaattgtcttccccgcagggtaagggagggcgtcgtcatcgtcggggccatcttcgtcggtctgcaagtatggtgggaatgaggcgacgttgcgatcatcaagccacgtaaatgctagatctagtagtgcttgtctggatagcttccccaaggattttgtaagagacggagttgatgagggaatgcggaggttatttggaagactggctgttgtcggggcgcgcaccgttttgggacgcgccatggccgtagttgacaaggtattgtggcaatacctagggaagttcaagatcaccttatatcaatggcaggtgcatgctctggatccatatcttgatctgttcccgagcttgtccaagttctgtccaaattccaaaatcgaccatcaacaaacatgcacgtgctgataagctgataagttccaaccttggaagagatcgaactgattatgtcatctgggagtcccgcccatggatccagcttgtgaagaactaagtgttgggaggtcacctgatcttggaaggcattaatcttatgcactttgaggttccgattcagcgaacacacagtgacctatcaaacgtgatatgtatatgtatatcaacaccctatgtataatatgcattattggatcgtgtatgaatgcgcaagggttttaagcagaccgaggcttgctgacaaaaatgtgggtcacaattgaccttctcgcaaagccatcgttgaaatgttgaaagttgtatgatgccgccaactttcgtttttaagcggacgttggattcttggactcaacgtcagaacttctttctcagtcccgggaaggatcatatacactttccttctcttgcgattgtgaatgaacctttccctccttcattatggaggcgaacgaaccacgcaaaaacgttgccgtaatcggcacagggatggctgggctagtggtcgcatacattctcaggaatgattctcggggcagatttgaggtggaagtattcgaaaaggtatagaagtataaaagattcacccgcgacatcatacatgcgaactaaaactaatcccaacaaaaacacacagcaagacaaactctcgctcgattccgcgtcatatgatctcacaaacgaaaaagacggaagcgcgaagcccgaacgtcttgatcttcccatgcgcacgtttgccgacggatactacgaaagtctcaagcgaatgtacgattatttcggcatcccatacggctcgctacggtttatttactccctgtcgtcactgccggacaatgccggaaaacaaccgtctccatactatatgcattcctcaaataaccaccaattacctcctttgcgtccggagggcttatcgtggactgggtggctgatcgaggtgtgctacctcgcaatatgctattattggttcaaagcctgctgcttcttcgtacctcccaaaacggtggagtcgtcgggtacggaagaatctctgcgtgaatatgtagagaggattatgttgcccagttactacgtgaaacactacttcctgccgatcttcgcgagtgttgcgacttgctcacatgatgcgctgatgaatttcccggctcttgatctggtcggttatgggagacgaaccttccgtaagaatcactacactgtccttggtggagttcaatatgtcgagaaaaagctgtccgaagacttgacgtataatcttggcgcgaaggtcacggcagttgagaatatcggtacaaaagttcaggtgagctggacagatacccatgatggccagagcaactcacggctatttgatcatgtcgttctggccgtgacgccaaatgtggttggcgcgattttccagcccctccaaagcgcaatgaacgcagttcccacaacgacagttcaatccgttgtgcaccgcgacttttcccgaatccaggattctagcaaatgcctctgggcacaagtatcattgaacgccggcgaaccagcacctcacccactccacatgtgctctaatgctacggcaactgagactgtccatgaacatccatcatctgctcttatcacgacgtatcctattgccccgatcgaccccgggaaggtcctgtatactgccaccttcactcgtgttttgcgatcgtccaccagcagacagatcgtcaacgaaattttcagtcagaagtctggagatgataagagccagctttggcggaacggagatggaaatgtctggcttgttggtggttggtgctgggacgggatggtactactagaagggtgtctttcttccgcgaccagggtggcaaaggcccttgacgtcgaggttccttggatgaaaaattcctctttataacggcctgtcaaggacatatcgagactttcacgtacatattcagttcgggcatctacaaatgttaatacctggggacacattgtacatagtatatactatgaacaaacgcatcatgagcatctgggctttgcgatgatatactaatctggtacagtctatggtctgctggccatttattcagggcccatttctcgctgactctttccacctcgaactcaccagaagataagcctagaagcctatatacaccaaatgcgcgataatactactacatggaaatggacactgttttacctctgacagaacgccaaattgtgtgtttagcgcatcacttacgcatgtcgggtcacctcgatgattgggttatggcggccatgtatttaatggtctacagcatccaggcagaggaccgactattgcgtctttcatagcacgtgttactcgtttcaataccaaggacatagtgacttattcgagcctcaatctctatgctcgaacttggaaacatgagctatccatataaacccaattcgtcccggcaaataaagtaccgcaacgcaatctccttttaaatacacaagttcataaatatctacatatatctgactcccgtcctctagggatatgcctggtttcaaatgcccctgaaatcaagtcagaccctacctgttgcctattaaaaagtccgagcaagtcaagttcaacgttggatgaactagctttataagtaactaagcccaatgctttctaaactcaatatataataccagtatcagcttccttggtgagagttatgctaaggttgtctgatccccggctgaaacgttagttttctctttccccgtttctagtaggacactacttgacatggagcctgaattggaattggaattggaattggaattttattgattcacaaaagaagatccgtgtacatttgaacgcgagtaatactttgcagtagctgcgagcaatcataagctttcctcacgagtcgaaaaatcattcaacgagtagtgtatccaccgttggcgaagatggtttgaccagtaatccaagcaccatcggtgcaaaggaagcgaatgataggagcaatgtccttgaccatggtgagacggttgcccatgccatttgctttgtggaattccacggcttcgggagattcctggggatagaagaaagctgttgataacatatcatgttagatccctagaacgagcaatgtatccctttattattcatgtcgacttacgtgtatccatcggtccaggggcgacattgttcacactgatgctgcgagattggagctccttgcaaacacccctacgatattgttagctcatgacttcgaccgatagtgcactggcaacataccgagtaaagtgctctacgggagctttgctaccagcgtaagaagtatagtagccagtaaaggctcctaggagcgcagtgacaatagtgatgatctttccgccatcagtcacatgagcagcagcttccttgagaacgaaaaatgcagtcttggagttcacgctagagacgtagttagccaaacactcttagcgagtttgcaatgcccttccccaacacaatacttacgcgaacatcgtgtcatattcttcctcgctaatctctgtaatgggcttcttcagcactctgccgacggtgttgaccacaatatcaacatggccaaaatcacgaataacatccttgaacagcttagttactgcagcagcagaggtcagatcgccctggtagaaggagactttgatcgaagggttcttttccttaagggaggctactagcgaggctccctccttttcgccgccggatgaatgatagtggagagcaagattggcgccctcgccagcgagctcgagggcactttgagcaccaaggttcttaacaccgccggtgataagggcgactttaccagaaagagacatttcgaaattgtaggtaataacaacggaggtttgtgataattgagtgatagaactgcaatttttggtcgagagatgtccgtcacttatatatttaggagtacgcaattgagcctattgtaatgtgagcgtagtatacagaatgccctacctagatgctgcattataaggcgttatccgcaaccggaaagatatggggcgtagccacaaatactttatttcattggcggtaatatgtgggtcagatttccccaaggttggatgtgatatcccgtttaggaagtcacatcaagaagctctatgaacctcattatacgcgatttcatgtcgtcatacgggtgtttgattctttttgattggttttcaagtagaagatttacattgtccatcaggagctacccaggaattgaccaggattaggatctggtataagttcatccccaaaggtcgtcgctgatccatgcaagaaagcggaattgcggtcaatccaaatcaccatccgatagagcaagccattcagccccagtgttgtgagcccccctcgtaaaccaatcactcgtacgagaccttgcatatggatactgtagttctcaagactgccgtacatggcttcatagcttgccatctttgctatagccattatcaaagcatcatttacagtccctgggtgctgagcctcaagacagcgattgatggacaggatagcttcacagcgaagaccaagaaggtccattttcatactgctaggatggctttgtagggaggcataatgcgatgcagcaagcagaatagtgacggagaacaaagcgggctcggtcatcactaatggaaaccaactggtcctcaggagaccggggttcccaggctggtcaagctcggggatatcaactgccatattcatcaagtcttacgatgttaatgaaagtccagtttttgctaaaccaaatccaaaaagtatatagacttacagtgatcgaccagtagtggagtccaaggctggtccgatataggataagacttgaaggggtccaccctaagtccgccaatttgaggcggtatcgaggctggtgccgaggtgaaagagtcgaacccggggcgggtttgaacttcagtggctttcacatcttgtgcaacatccagctgcgccgcacccagcaggagcctagtccggagtcgcttatctcgacgtgcttgcttccattgataacgcgtcacgtgagaccggaactcgggctccttggcgagctgaagggcgtcccctggtttctgtacgttgacgaagacaaaatccatccccatgatcctatgtgtggttattattcgacttgggcggcatctccagccgtcgctgacagatctcgggatgtcaagagactgacaagaggtgagggataaaactcgcccacggatttagcggatttacggattttccgttgcggcgaaaagtggcctagctgagccccctttagcccgatcatttgtttttttgtgcggtagcaaaagattatgttactgttttatcattctcgctaaatctatttgcattttcctgatgggaatatgattatgtataagaacaagcagttatctgttcattgccggtgaacagtcccctccgcctgttcttcggcttcctcagccgcatgcccttcctggacagcttcataaaatggcgcgaacttgctcttcatcctcaatcgcttaccgaagaagtaaaatccaatgggaattggaacgaggacagctgcgacgcatccgagaagcgtagaagcccactggatacccatgccttggaacatctggcgtgagaaaagcgggaagctggctgccaccatcgagcggcagaaggtgtttgctgcaatggctgatgcggcgctatagatagtatgttagatgatcccatgaacaaatggaggaatggcgcgcgagtatgacatacaacataagatacgtgtcaatcagataattgaacaattgaatgaagataatcagaagaccaaatccagtaaataggccactcagggtaggcacgatccagtggatggtaccgttgaagccagtccatccaaaccagaagagaccggcagcgaagagagcaccaccagccatcactggcgggagacgccactcggggatagggacaccaccgttcatgtcgagtttcttattatagcccttgctggcgatgatgatataagtcgcggcgatgaacaggcccaccaccatgccgaagaggggaagtcctccaacaccagcgttcataccgtaaacgccctggaagaccagagtgtaggccgttaagaagcagtagagcaacccgtagataaaacttaggtagacagtgacggcgaggatcaatggctcgttaattagcagtcgaagcggacgagagaagttgtttacgatcaggtctcgaaggtcgacttcaatctcctcctgcttcgcatgtattccccaattcttagtgcgacgacgtagctccgaagccttatccacaaggaccacaggtgggtacgactcctttagaaagacaacattcaggaggaaagcggcgaagcccatgaacgctgggatataggcggtccagcgccacccgagataggacatgttaatgaagcctccgatgaaaggtgctaggagagggcctaggaacacggtcgaggagaacatggcaatagcaacaccacgggtgcggttgtcccagatatcagagaacacagcagccacaactgccaagggacaactgccgaaaataccacagaagaatcggcaaatcatgagcgtttgcaagtctttcgcgactgccactgcgatgttgaagacgccaaatccgaacatggcgacgatgatagggagacgacgacccttgagttcggataggggagcccatatcaagggacctgatgcgtacccgatgatgtatagagagctggagaggacggcgacttcaaggccgacgctgaagtaactcgagacattattggatgaagcactaaaaacggcggaatcgaaggtggagcaaatactggtgaaggcgaggatagcactaatgtagcatctagtttgagaagtcagtatcggagtatcaatgctgcacattaaatgcccagtacggtacggaaaattcatggtgagacgacttactttcttttcaagggccagttcagcgggtataatgggtcatttggcccatcgaactccacaacgtaatcttcccgttcaggaagaggtggagggtatggtttgcccccaccaaaggctggcaatggagcccgtgacggtcgcgactgaagactctcacccacggtgagcgcatgttgagcgcgttgcgtctcggtcctgctcaatgctcgcgatgtcccagtccgatggcgttccaagtccagttctgtgtttcgcgattgtagcctatgcacctgggggtcatattcagagatactcgagccggtcgatgatccgatagaggctgaagtagtacgtctctctatctcagccgagttccgtggcttctcgctcggtatatgcgattcttcggtctcaggcagttgatcggccatattgccaagggagaccgctttaccgattcggggattatgatctggccgatcttgtagatcttcttggctgcagtctctcttttcccccgttgggactgtcagaaagatcagagaggtacctgtgcctgaaatatagaagggtagaggattttttttgccatccaaacgcggacaatttgtttataaaaacttgaacagaaaaaaaaggagcgccgaaagcaactatgatcgtctagacccaccacttagcggcttcagcgttggataactgccgaattgtcggataaaacggaagctggcctcagcacccgtggacttcctgaccaattagtaattaggatattatatccatgtatgtagttatatagattttaatttatattgccaatatcaatgaacaagttgcctggaggtgccaccgcctcttgacgtcatcatgaaacagcccacgagctacctacctaaagtacctctaactagttagttataccttagatacctataggtaggcttccacaaggctacatgtggcttgattacatgaggcttgattgtgctgagaaaagcttcacctacctagtaagtctattaagctgtacaccaggcctgaaagctatccacgagatttctttacgggtgcctcgatctatctacatcggaaaggtatgacgcactgatttgaatttactgatctattggtaatgcaatctcggagaaatagaagatacctaggtagctatcgaagtattcttttcatcttggtagaagattcaaatggaaggatcaatgaacgagaagctcccgacgctttcctctttctttagttattggagtactatcgcaatggattggtttggtcggtttttatagctgccatacaccacgccttgctaaaaatggccgaaaataccaccttttgacatataaccacatgcgacagctagagactggaccatccaaaccattaagccttcctcgcaacaacaacaacgcccctaacaaccctccccttagcccaccacccaaacacaaacctcgccgcacgaaacttccccatcttaatcccaaatggccttgcctcttcaatcctgcgctcaatgaagtctgccaacccaccaaaaacgtgctccgagatatctcggatctcaataaaagcaggattatacccagctgaaatgagtagctccacatattccttctcggaaacaaaattgccgaatggcgagttcgtgccccagcacacgagtcggaggaggatcctttcgtaccaagatatactatcagataatatcaagtcgaaggccatgaacgaggcattgagggtgttgtgtgcataggttaggagaggtaagcgggaggggcggaagtgatatatcgtgtccaaggccaggagccatgtagacgtgtcttcattctcattttgcttagttgacgcgactgcaagggccgtgactgatttcttcaactccccggtccaagagctggggactgcagcgtccgcgcagaagatatctgcctggatagggtcattgctgtctcgcttcatatgattaatgcggcgtgagccgagcgcggcctgcgctgactccagcgtgattccaatataggaatccaggtgtatcagagaggaggattgcagcttggtcttgctatgacgagaccgcaggccacactctgatgggtgaatatcagatgcgctagtggagatagagacaggggttgttgccgtggttccgatcccagccccttcagaatcggacggggatgtagaagaatggccatttaaaaccttcgtcaggtataacgactgatcaccacacccgcacccgacatctaggattctcacggcagacgccttctccgttgatagcgcagccgtgagaacctgctctaggagcgcttggcaggcttcggggaaatcatctgtgtactgtgatgtttgtcaatgtggatttcaaataagggacttttacatgagacaattgcctaaatgatctttatctgagttgacttacctcccagtaccccatgttcatccacatgctctgcggtgggagctgtatgttgaggacggcatgatctagaccatacacgtttgcgtgtggttttctcagggcacgtttgagggacccaaacatttcttaatagtccggggaatagaagcagacaatccgttctctttcctcgaattttggaaacctagtgtggagtctgctgggccaatcagctattaatgataagccgtgttggtccacggtgtacagtgacgtttcatgagtgcttgcaccccagtactgcggaaggcaccaggccacctttctgcctattaacacttcactcaacgcattaaactaatagtttaacagtaaatagaaagctcacatacacgcttatggatatatgttagaagctcccgctagcgggctataatagaagaaagtacaggaagagcaccaggtggaagtactggggtgcaaatactcatgaaacatgactgtatattgaagggatattgggcgatttcttgcaatggatagtctaggcgagttggacagacgtaaaactggaccgaaacacatgaataattgcatcaaaaatacttgtactgcgtgaagagacatcactcatccgcccaccaccccctggacctgcagacataatacccaatatagctctagctacctaaaaaaaaaaagagagagaataacatcgctggagaagaacactataaacaagaagacaaagatggtgaggtggagctaacagacaaaagcccaggacagtcaccacctgaagcagcagagcggagtaacagggcaatcaaataagactgggtggggtttctttctttctttcttttggcgacttttttctttttctttagtattgggcaattacttcatacagtggtgcccacaccgcgcttcaggtcagaagtacttgaaccatcagccttctgtgaggccaagaacttcttgaacatatccgagatgtcttgctcagactgctcgtcggctccgttcttctccatgatcagaccacggagccagtggttctccagctcgagctgagacacgcgagcctcgagaatatcgttcttttcggtggtctccttcacagtctgctcgagagcagcctcacgctgcttcttcttcacacggaagcgagcactggcggcggtgttacgacggcgcttgtcctcctcggccatttggcgactagcctcctcgacgctggccgcatttgcggagctcttgcgtttagtgccggtaaccggagtggaaggcgacaccgacgcagatgacggggccggagcgacctttggcgcgttgttgataggcgcaggctggataggtgcctggtttgcagtcacaggcccactaggaacggacgaaaagtggggattgtgcatgggcacctggacgttggaggtcaggttgggctgataatcgggtatgccattaagaccatctgctggaaagccattagcattggttcaatttccaaacaacatgcacatcgcgagtttcggtttcccgaaagtagttggggtccgagcacaggtgccaatcacgtggaatggcgtaatagtggggagcattcacgtcaacgaccaaggtcaagtttgagtggaagaaaaccctgctagggccacgggaaggatgacatgcagggctcaaatttgctagccaaggaggtcaaagctgtgaaagggcgtgggatgatattgagcgcacgaagcgcacgaagcgccaaaaatgccaaacccagcccagatctgaggcgtgcaataggcaagaatgacgaattcataaggcaaccaatgaaacgacatgcaagatgtagacatcggtccaatcaacccaattgtgaataaggctggtgcgatcaggggaaagctgtgcagctcggacttgggactacccaaccagcgatggaaaagacacgaaccgataataatcacacttaccattcaggaaatccaagaacttcagatcctcattctgcgcggattgatctgggacgacctggtgtgtcttttcctcttctggcgagaatgaaggtaggccgctgaagtcggtaaacttgtcaaactcgaagaactcggtattggtgaacagagctaggtcctcatcgttgaacgtagtctgctgctgttgctgctgctgggcctggtcgtatggtgagggaatcgcgtttaagtcatcgaggtattgcgagaagttgggcatgcggcgcccattgtagttggccatgatgaaagttccccgttttccccggtacaatcagctgagggagaagccggaaaccgatcttcttgatgccgatggagtgtgtggaaatgcgcgttgcgcagaccggagagacgtgactcagatgccgaatgcggctcggtgcggattcgtcgcgagtgcgatggaagtcgaagcacctacgaggtgactatgtttcgcctcgtgtgaatggcggttttggagatgttgtaagttggatagaagtcggagcgaaggacagagaagttggagccacaagtgggttttttctttgaatgttcagtgggggtgggaggcccggggcgccggaggggtgatgattaatcccccaatttgccttcatttgcctcctaatccggacatcctgtttctgttggggatatatcctatacttataataaattccctttctcttccaatttacctctcccttttattccttcccacgctctatgtaaatctaatatacaacattgcataggtatagaaacgaatcgatcgaaggccgagaatcggagcccactgagtttaaatcctcggttccacgttccatttttggatagaaaatcccacgatgatcctacatctagtactccgtactaacattgtatgagatgggatgaacagtgcataaattgcgaatcgcaaattgctctactactactccgtacatttcctcattttcctagccagagtacattcaataacccagcgacaaacgcggctctctcacaaaaccaacccgaaacggccccgaaatcggggtctgccaccgctgattggcggacttgaccagcttggtcagcatcgaactcaatggaggaacaagttattctgcggattttccgaggtcgctccgaattattaatcaacaaacctcacctgggcattcgaatccgatatcttgactattatggaagatcatttcaacgtcaaacaaacatattaagacggtacggtacatgagggcccttgataatccttaagcacagacttttacaagggttgttcaaattcagatgccggatgactcgatgagattagcttttcttatttcggtgcactggcactggccagtggcggctctgcgtataaggaataaaaaccgagtcgtcaatctcttggcttattaggaatcaccaattcgatccggtaatgagcactctactttcaatgatgaatgcaagtgcatagcatgtggactgattttcctactatccccgcactcatatacatagtagcggataatagctcttgagggctttgcccttcgattttagtacctagtcctggcttttccatcaaatgtttgctcactaagttatgaactgagcgtacctagatatgatcgacctgagtaagctaaatcaataaccttggaaactgcagcacgccagctttattccgtgcacctctaacccaccatcgttccatcgaagggatttggaacatcagcttaagtgtccatcctcacagtctcttttctatggaagcgaaggacttgcggtgcggttattcaatttacgctcctaggaatatccctaaattggatttggacgactagggcgaggacaattaggtggatctctatgggatctgagccctgccctataaagtcaactggagagatctatgttcagcgagtaatgactatatattacttctcccgtcgacgagcacatacgctaaaggctttcgtgggcatatttctaccaaaaataatgccgctgtaaatagttatatatataaccgctgtccccaaaaatggtcgatctatagttttcgctcatagacatcttaatctaacacattttcggcttctaatatggatgtgagcgaccttcgtaaactccttcgtacataccaacaataatactctaggttgccattaacttagctcaaaacgctaaaagtcagcatttcaagttcatcaatgaagccgcaaaccttcccggagaaggtctgcttccctagaaacccttaaaagctaccaaaagtacaactatggcggtaatgtgactataccatcgattatcttttatcaatactacgggggaaggtctagtaagcgtagtacatgtcatatgagatccaagcgcaggccgtatgtcgagatgttccggaaggacctctattcaaagctcgttagccacgaagtggacaagagaacaaaacagtgaggattgttgaattctagctataggtccccatgaaagctctcaaattacctggcacagcagaattaatttcataggtggagatttgcggctccagagaataataataaaaggaagcgttcaggtctaattgcgcaccgtcttcggaaattactagtaaaatcaacctagaaaagctacttgttatatctttctaaacggcctacatcctaattttatctgttctcaaccatttcgagtagaaacagattaatttgagattgatacacatacttcttcgacgctgaagtggcgaatgggtgttttcctacggtagcaacgatattttggacccgggtgtgcaagtacagtgtcgataaaagctcacctgcgtccactgcctccaagcccctagctcttaatagaactcgacccaccagcccaacggatattaagcgttttgctgtcggtattcgaatctcatgcccaagacatcttaggtcggtgttggctagagttgaagctacaggttcagtaaccagtatcatactagtagactgtcggtcagtgattgtatgcgtttagtgaccagctgtcctagtgtacacaagtagcggtctagtataggtcagccacgatacctgtacgccgggtaatgtttgggatactacaagcaaataagacaaatgcatttccctaatatagcatgatcgtatacagagtagtgctcctgctattgcaggttttcagaactataagtccttgtttgatacgtcttttattccgtatgttctatgatgatatcaagcatatcattagctcagttttcccggcctaactaagcgggcgttactttattgagatttacctactatagctctcttctagctactagactgggctcagcctactaccaaaacccgaactcaacgtgggttgggtgtgaagttcctatcttaggcacacttgcggttcatagcgatgtgtaagtacacgtcactgcccgggagctaatcgatacaagtaaatatcctgctagctgacatctaagccattgtcctccgcatttgtgcagttgctgattgctgatcgcgacggtgtcaaactcagctctcggcgccttgcttgcttgctacatccacgttctcgttgcgcctattgtctaatatcactacacgtcagcctaatgcactgcccaggtagcccggtttctctctggcctatcatgtttggggcattaatgcaaatttcatggtagtctaatccagtgcttcaaccgacttacggtcagtatcttgcgtagtttctaaataccgctccaagttgttgatcagtatcttgcaggttggcgagactaccgggattcgcttggaagacttctatatcctctaggcgtatattattttcaattttgagtgtcattgggcctttgctctctgtttcgcgtgcttgcataccctttcaagcagaaggctcaggagagtgacttgattcaactcgatctcgttttcattcacgtgccatagatttgcattctccttgtcccctttctcaagtttcttctatactcctactgcgctcctcctcactttctatgttgtatttgattttctctttcgtgtctttattttattgtgttgatatcccaatacttacgccgagcctctcttcttcttcttttttttatcaatttgttcccacttggtggcggtgagaatacttagatctcgattggcgtagtgaaagccacattatgcatttcctgcatgattttggcagatccagatccataatttctcgattaataataattgaaagatgatacgtaccacccacatatgatatactacaacggctagtagacgcacgttttagggtagataagtcctgttcactccaggtacgtactggcctgcgctattgaaccaagtgcacatctgtgacgtgttggggtcacactccaatcagacctgataatatagcgcccaggctgcatatatcaggatctagtataacattcatactacgccaagtctgtgagcgactcagttacatttctctactctatagtgatgcagtactttctgccgcactattgcaacaatgtggagacctaaagaatctcagactgctcccttgaggaatggatcgacttcttccatctcgacacgtaattttggtctcttttacaggcagccactgtagatggggtaatgtcgcagtgacattcacgacctgcattgcatagttgtacaggattgccggggacagacaccttacatcactgggtgtgattggcctattcagatccgtggatgaatatcaaggaacaatctggttgcagctttcactatacgaggatgtgcagtgacaacatcattaatgcgtaacggaggggcgctctttcgtctcaacacttccaagcattagccactgtatggtgtagcttgaattatataaaggaccccttccccccgttgaaccctttccctggaacacctgcaattgaagaaaattgagcctgtcatccaaaatggcacctcccaacaaggagaacatccagggagacatctggtaagttgataccctgctatctgtttcaatctgggaattcattctaatgatcccaggccccgtttgtccaagaagcatgagctgtttgtcttcttccgcatcactgaccctgtgaagttcaaagaccacctggctgtcctcgttccaagtctcacgactgccagtgatgctgagacgtttaggaaggacatttacaagaagaaggccgaaggtactctaaaaagtatcgtctttttctctgccatcaatgttgccttctccgccaagggtctagcaaaggtgggttataagactactcgataattacatgagccgcactaaacaatgctagcttggagcggagccattcaccgatgatgtcttcaacaacggccagtgggaggacctgacctacccccttgagggagatgaaaaggcaaagcataacggtctcgatgaccagcatgattggttccaccaattcaccccacgaaatggatatctcgacggtgttttcactatcaccggtgatactgaaaagaccttggttaataccgttagatcggttaagaaggctttcggagtcggtcttgagaaaggagacatcccatccactggaggtcataccatcgacacgccaagtgttcaatttgtctttcagcagcagggacatgttcttgatgatgacaaagaacagtaggatacttcacgctcattatacatattatatcagactaatccactgtttagctttggatgggttgatggtatctcccagccaattgtcattggtctggacaccgatgaaaaggtcgaagaagccaagaagggtttgaagccaattcaggctgggtaagctctaaacatcccacaccaagatgcctggaaatccagtcgctgatggcctcgctagtactattcttgttggaggtgaaggcgatcaaagcaatcacccggcttgggccaaagagggaagcttcatggtgttccgcacatatgaacaaagaacaccggagttcgttgcgtaagtgtaccctcttcgaatttgttctacgatactacgataatctaaccctttcagctggtgtgccgcgaacaccaagaaattgaaaaatccggggcaaaaggccgaagctatggtagatcttcgaaaattctcctcccgtattgttggaagatggcccaacggtaagattgcctcttggatgtgccttgacttgcagcattcacttacttgatatgtacaggagccccgcttgaactttacccagacgcagatcccacccctctgagggatcctgatccagaaacgaacaagaagttattgttcaaggaatggagtgaacagggtaaaaatcctcacgaggaatacaaaaaactggaagcgacgaatcacacggatgccttcacttacaaccctgaggaccaaactagatgtccttacgctgcccatatccggaagtgcgggcctcgagatgacttccccaattacgaaaggcatcttatgatgcgacgaggaatcccctacggaccagtgacagagaccaacgagaagggtgctggcgtgtcccagcatgatcgtggtctgttgttcgtttcctaccagagcgacatcaccaacggattcaggtttgtccagaaaggttcgtactcccccacaatgacaatacattcataattaacaacccacagaatgggcaaacaaggcggataagcctgtcgatttctctgacaagctgggaggcaaagccccgcagggtatcgacgctatcatcggtcaaatgcctccctactatcgcgcggagaatgacgttaccaaatatgacagcccagctcctaatgcgaacttccctgatgttgagaagcctgtgccgaagccgagcaaacactggattcctattgaacgctgggttatccctcgcggtggtgagtacttctttgctccttcaatttctggaatcagagagactctttgcaaataagcggggcccttgcttcattccacatacattcacccgatgatgatgtgctatgcgtctggactcgttcagttttagtcttttgctggtagatagtttgatgctctgtgcccttctcggtagcaaacatggctcgattacatcagtctcttatctctctaattgcctaaacttgatcttaccatggtgatactacaaatggatgtactgcatgaatatgtgggcaaatcccttgttcttgattcagatagaactaactctattcccaatgttgctccaatggaaatttacctgacgcaagtatcccagttctctcggttaaggcgagaccatgctgtatcctatggcattccactccataacaatagaactttatagtgttgtggtcgtggcaaatagcactgtgtggatagctgatatacgcatgcggttatgtgaagtactactgtcgaaccgtaggtatgatatgcgagttgcgatatgctacggcggtggtatcttctgaatcctttacactgcagttctaatgatccataattgggtgaaccaagggtgtagcaggacggatttgtgcggaacaatgcttagcgttttggatgacggaaatactcaagtgttgcccagccttcaaacgaaggaaaaaggttgtacggcacggaacggtccacaatggacggaatgggccagaggcgtccttgcagcattagatcgtcgtcataccgacatgctgtacaactcgagctgtggatctatgccttatgcatgcgtcttggcgcggccaatcaatcgaaagttatattgggaccgatgcaacacatcctcaaggtttattgaccgaatttgtctgagttatattcattcagctacacctaacaaaaaaggactcactgccttgcttgcaagatatgcagcttattggagaatgctgctggttcaggtccacatctatcaataactctaaatcctatacatcatgcatccatggatgggcatgagtagaaattacaacatagctgaagctagaagacaggttttaagcaagccttccacataaatagctctacaatcgcatccctagcgtgtcttgttacgccttccatccacaaaatctctctatcctttgacaaacctgccccaacaatctctcaagatgcagttctcatccttcctattcgccactctcctgttggctgcctccagcgtctgggcccaggacttcgcctctgaggaaccccgtacctgcctgagtgtctgcagagcggagaagtttaagtgccttcccggcatggagcctgaactgattgatcccgagggcgacaaagtaagtggccactctacttaccctgtagcttgatactaatgtgtcgaatagccctgctggacttgctgtaacaagaaacaatgaaaatttaccacaagcgaaggtgaatggctggacttgaacttttacctggaggacaccatgaattcatgatcccgtggcgtcaacttttgtaaagtagttattccgccttcataatctggtaaaataatagtattatccatcgttcgaagtaggactactaccattctgttgattaggacttcggtcacaagtctgtgtttttatccatcgcataataaatgctcggtgggtctatagtcgaaaatcatgtgtccaagagcaagttattctgcgcataaatgagaaaaacagttgccttagcaagcagcagttgttgtattctcaggtgttaacgatctagcataaccaggaggtacacatatcccactttaacacgatccctagccaacaattcccttccccactacactggaaccctttgcaatgcggagcactcacatccaaagcaaagtgataaattgtaaatgtttacggcatcgaagcacggcgcctcatcaagacgctatcgggttacaacctcgcactgaggttcactgtaggtaggtccaagcagaagggatggccactcctatgggaggaggattcttaacagataactatgcaggggaaaaatatatctactccgtacgagtagcagggaacaggtcctaacaaacgccagccggggggaggggggagggggctgctcaggtagccactcatctcaacaaaaagcaaccgtgaacataaaataaccgtcttcgttcttgacgtaaggagagggtacgcagtaggaaatgttcagatatacagacccacctcagccagccaccaacattgtgacgcttcagcaaagcctagcagggctgcgagacgctgtccggttcacccctctcgcattctcttcgacctctcagcaagctcaacacgctgctaaacagtccccaatcttctacctaaatccctcccgtagtctcctcagtatctggatcatccactaggacgtaattaactatttattctgcacgcgtagcggtcatggtcgagggatctgcgggtcttggtgtgtaagaaacaattgcagcccgcgcgtagctatgtcaacaaagacgtccgattcctggctgcagatctgtgaagctttctgttggctattgaggggccatacatacggcacaatcagccttaccgttcaaggtggtccttgtcagtctataccgctatatgctttaagatcggctttgaagatctcccaagacgaagcaagagaaaagggacagacagaatttcagggtatcacgagggcataaaaaatactgggttgagccattcttgttctctattattgggggtaccagttattccgattccagtatacgcatatcaggttgcatattgctcttgccggttgtcagggcaactgcatcattccttgcttaatccgtaccccgacgtgctctctgccctcacggcacttcccgttgagcttggagcaaccccggttacacctacaactaaagggacaaagtacaaagattatagtggcttggcaattattcagccattggaaaactctgggttggcttgcagatgacaatgtatatgaacaaatgtatttgataatagttgttgcacatatctcactaaagagagagcaaggacctcatacgtcaaaccatatgtagctttccacatttcacattgccaccaataccgaatcacaacgacagttgagagacgtttggtttccgtttgtaagtcacatctaataaatgatcgggttacccgcatcaagtctatccaggatctaaaatgaactcgtcagttgggcgtcaaaaaggaaatagaacaccggaagccgtacccattggtcgagttcatgttcgtcgttgtatctgaggttctcgaattggctatccaaatgctctggatttgaacgttagcctggtccgtactatttctccttcggttccacagttatcactcaccagcagttacattgacatgatcggggacaagatcattcagctgccagcttcccaagaactcggtagcctcactcgcgttgcctatttggctaaggtcgtaacggacggctgcgctgggttagcgaacgtcatcgatgtagacccacgacgaaagcctaccttcgtctccgtagcctttgtccttcacaaacttcagcgactccctgatttctttttcgtatgtatctttaggatcgtcggtcggacatccgtcggtgaccgtcaaaataagaaggggccggtccagcacttcgcccttattaagtggatcgtagagtaagtcactcaagactttagcttttaggttcgcacccaacggagtcggtccattgggggtaaacttcatcttcgaggtaagttcgccagggctgattttatcgaatttctcgttcttgttgataaaccgaagataaacctgtgcgttcccttccggagcagccctcgtgataaggtctgccatccgtccaaccatcgttgcttgtttgttcatgcggtcgtcatcagccatcgagccactatcatctataggcaactagtgtaagtatggtgttcttatgcgatttgccgactgacctaccgcagtaaaagacaggctggtacaaagcctggcgtgacataatagtcacattcctgggtgttgcacccgggaaagtcgaatcgttcaggatcttggctgctttctctgctaccttatgcacatactcattaccctctgggaagatgtcctcaagaccctttgcatggatgaagttttcaaggttcgacaggatttcctccgccgtgcgggggttcgtaatttgctattccagggttagcaaattcagaaacgaagaactttggatgacaaggtacatacgcctggcactggttctgacaatgcagcaagacgatttatggcattcttgccgacgtccctgaaattcttgaagtaggccatggcaaacagaccggagctaacgagaagattctcgagttctggcttccattccggcttctcgtccttggggcggatagccttgtgaacggcagtgtttgtagacttttcggcaaggttcgcaggtgtctcgccgagctcgttcgacctatccatggccgctccagcctgaacgagggcacggatagcctcggggctagtgccttgtcgaatcgctgacatcaacggagtgtcaccttttggccgtgagaccggcttgtctggcttggcaccgtgcttgagcagaagctcaacaatgcggccgctgtttggtgccagagtcgccgcatagaggggggtcttgccatctggggatactctgttggcatccgcatcgttctgcagaagcagctttacggcacccacatggccgtttcgaattgccaggtctagggctgtatcaccgtagctgtccacatcattgacttcgtcctggatgaggagctggccgatgttatccatattgagagttccgctcttcgcgtgagtgtgaaggttttcttccattatgaaaacacctgtcgcgatgtactcgagagttatgctgagctaaggccaggttaattagtttaacaagaatgaaggctatagtctatcggttccatagccatgtttatacccctaggtggagccaaagacgcttcctgtttgcagctttcagacagcctcatttgtcccattggcacgtaactttgcactcaggcgatacatcacctaaattttcactcttcaggagaccatctcgttctaccgacacatgatgagccaatactcggccacgaacctcagggtagtgacgctagtgacgtcaacacgaagcgcgacttgcctggcccaccgtgggtcatgaccaggtaacttcaatgtcgcatgatatttccagctgagaattcagggttgcacggcagcttccctgcgaagatcttaaggtgaccgctagtttccgcaagagggcccgctttcagctgagccatctatacctcttattgacaactgattggctctgatgcagtgtaacatcatgttatagcattctgcattcgtttatgtcaattatcgacacgcttttcactacttcgtgaacagattcaaaagattgttggttgcactcatgggctgccgagcatggattttattgttctcccgctgtcgtatgatggtaaggttccaaaactctgtggatgattaatttcaactacgccatatagcgatatgtacatgttgcgcaccttctgttgattgctggatttcagaatgaggaacattttataagcctttcagaaggccgtcgaggataaacatgcggatgtgatgagtctgctcacgtattgcgggaatgatctgctgatcgaggactccgggggatctcgcctaaatttgtcaggcaggagaaggaactgtgtgaggagattgaccaggggcttatacctgacggatctttactcgttatatattatatacttttcatttttgtttcttttcttttcttttcttttttctcaccacttgtgatcttggcactcgcgcgacctctataacctcaaaatgcgaccgtcgctctggcgctcaaatgtgcaaataggagctgtaccagtggcatgacattattgataggttcgtctcgagacccgctctttacggaacgggccgcgaattagagggctcggcgccggtagcattgaccactggctctacctacacaacataggtatttaggtaagtcatggccagtggcaaccaagagtctttgatgcaaagctggttctggtagttctgcctgcgcaataagcttgtcaggacaggtttcctgatcctactgtgcagggcggctatttgaaaagaaaaatactctgctatcagtctatcagattggtcaattacaaagaaaaacgaaagcagactttgcatttcaattacagtatcgaaaaccccaaaaagtaacatgaaagggggaaaaagaaggaaagtctacctaatatcatggcccaagtaatcgtccaagggaaatatattagtctgctggtttcgcaggtgatttcctccaagagtcgactgtgattattgccgcttccgtatcccagcattctatcctccgaaagtaccttgttgctttagacagccataaggttgtccagctgtccgtccagctttcaacttaaagaagctgcccagaactccaatccgagtgctgagtggggaccatgcccttcccggtagatcgcatgtaacaggtcttgtctttgccatttgtcttccacaggaatcgcacacactccttttccttcgcgcactgctcggcgcagtctttgaaagaggccgctctgggagtgcggaagttcgctacgtcgcgggcgtcatcaactatctagaagtcagcatgtctctgctataagaccttattgagggaggcaaacgtttagcatagtgaatcttgaattgttcatctccagcgctgatgatgcattgatcgtcgccaggctctgtgacccagtggtcagttccagttgaaaagctagggagtgacattacaggggtctaaggattttatcacttaccggcttcgacaaggttcgtacggcacttcccgccaggggtcgatgtattgcaagcgtttagcttctcgttgagcgatttgatctgcgacttgagttcggagatctcgtcttctttgtctttgagatcctgattcaagcggcttctgtcgttctcgcactggtgcttctgattgttgagctcggccttctctctctcacatgcacgttcatcctcgcgacactgtttcctcttctcttcaattttagcagagtcaagccggcactcctctgcagctttttcggattctagcctgccgagttcgcattgcttcaatttttcagggtccacctggttgctttcgcacatgtcgagatcatgctgagcttgctctaggttatcattgcagattttgttatcgtcaatgcactggtccctctctttagtgcacttttcgcactccggttctggtttggggatcatgtcatcgtcatcttcatccttctcgactttaacgagtgacatgaatttgcgcacaggccgctgagccttgttgttgttgtctgcgacgaagaagcagttgccctttgcgttctcgtctagagttcgaaaggaaatcgcctcacagccctcggacgcgcagcgcgaggcacactcgaaagcgttggctgcctctatttgggtcggcttcacgcgcagcatggtcccgcaggtccatttccatttggcattatcaatagagacctcgcctttttgctgtgttggatcactgcagcaagcgttgcggtcattggactccaagcaggatgaggatgttgatatttcggtgaagctaatccagtttccatcgtcctgatggtccatgttgtctcccaatgtgaagaagcagttcccgcggtttgggttgccgcgtgtgttgaaggatgatgcttcgcaggacgggtcttttgaacagtgtgtcgcacagtcgagagcattcttggccgtgaagggtttgccgaaggagtcgagtgagatatatctcgatccgcaagtaattaagaacgtgcggtggtcaattgtcaccttgtcagagggcgccccattgaggcagcactcgttaggattaccggttttcaggcattctgaactgccgccgatcggtgcttggtcggcgaaggccagagcggcgcctagcagtaggagggatgatttggcaaccatggtcaagcaagaaacgaactctggttgtcgtggaaagacaaggacagcaggaagtgctcaaaaagcttcaataaatagtacagcgacgaggccatcaggccgtctacaaccctttttctcgccctcgcgttgtagccccaccccgatactcagatatgatgtaaagtaatgctgtcattaaggagagaggaggtgtcagggtcatagatcgagtgacaagttacattggtagacctgaaagtgggtagctaggactctggaatgctcagctgaaccagttcagctcagccttctgccggatgtggagctgtgagatcgtagatcccccgacatcctaaaaggagggtctcagccatctactgccgaacgaatagaatcgcccaaaaggtcgcaaaataagggttgctattgagtgccagtgaggttgctacctgcaaggaggctacatgaactatatccaattatccaatgctctctgcaattctgcatgcagcgtacattgtaggtcctacatgatgctttcatagttcgcctaacaccatgctctttttgtatatttcatttatgatcatcggggtgcttaccctaaagacactgatgtagggaagggtggtattggtctactccgtataccctcctaggtaacaaccgctgtaatagcataggatggtgaagtaggatcttctagatttgcccggtacctccggggctattcttacataagggagaagactacctactacgtaggtagccatggatggatgttttgcgaatctgaataccaggttactacacgcacaagtcgtcagctcaagcactttagattagctggaatgaatgttttcctgctgagatatgaaagtgtccagtttagttagtacagctccgagcacaaaaaaaaacattctagaagaccgaaagatatactctctagccaagaaccaattcgccttctcagaaagtcgaaatgaacagacgcttcaagctttatatatatttcagtgaacctggattcctcagttggtatttgagttaatacctagttagcgtgcggctccgccatagtatagcaatcagcccggatgacttggttcctgtcatctaagataaaaccaagctcctataccactctagcatcgtcaatcaatatcttgaggaagtctataaaattaaactaaaaagggcactaagattcttgttggatttatggaatcttcctcagacatagattacacggccttgtttcgggatcagctagctatagtgatgggattcttggagcaggtcggatatcaaccccagatgagagcaattaggtctacaaggttctttgctttcttcccgtatattacatataacaagtataaccaagaaacaatgctatactataatgaataaaagattaagaaaacagccaggtaggaaactacaggcatacaaatatagcttgttgagttcagtaagttaccaattgaagcgagctggcctaaaattatgaggcatctaataaaactcaccgagtgttccacgaattctgggcggcgttacccttcctattgccaatataaatatgggaggcagtttgagtgaccgaataaaaagaacctggttaagcaatatttgacggttgtacatcgttatataagtgtggaaggatgagagctctgggagaatacgtctagatagtgcaacgtgagttcgcactgatatgtcgagtcccacctagtgaggtatgatcgcgacgggtgtacaaaggtccttgccaactagtgcagtcagctatcctatggcccgaatgtcggcagttagcttcagctcacgctctccgacgagagaggtcaatatcaggcagaaccggtattttgacctctagtgtagataacaaaaaggcttatccgtttcggtgcttgcccatattctttcccggcttagaattgacaggttgaaatataacagatacggggtctaattccggtctcgaaggtaaggatgcccgttgtttcagccgtaatttggttttttcttttatgtaccctgcgagacgtcgcactgcaacaccattggagtattatgcccacttgtgcgatttcacaggatatggatcaactctatgaaagctgacgagacattgctcagctggccaaacgagaataaacagcacttacacatgacttggcaaacagtgcagtgggtgcatgattgtatcttcgtactgaaaatcccctgctaggtgtgtcaaatgaggcgaacgacccgagagcaacttgcgaaaaccgtatgaacaataacacaggccaaatggtgggtaggggtattccattcctgctttccctctagctaacatagtatttatattcgcctgggaaccatcacaggagaattgccatttttattcggttgctggaacatgtccgccggtgatgtgatattctcgcggcaaccttgggacgtatgagctccgaaatgtccatcgggatcatccgggacattattacgcagccttccacagaaactgtcaaacccgaagtcctatctagccaaagtaaccatgttcgggggcaataatttgttgcagagccctctccgttcacgctccccactgccaatatcatctccagtgcatcaacaagcctgaacataagcaaagcatgagaaagaccaaccatccgtcgtcaagcatgggccaaaaaggtctgccatctatatcaaacccctcgtccttccggttcgtctcaggtcaaccggtgaacgatagcggcaacaacaagaagcaacacagcgggactggatatcacgaagatggcatggagaaagacctggacgagctttctgacgaagaatggtttcagacaggagttgactttgttttgtcgtaagtatccgtatcttccgttgatattcccaacattgtcctcacgaacctggagactggaacgaccatgtctgtcgcatatctcaagcccacagccttcgggtcatgctgtgtcaatgcaaggcacgctgctacaacttgcacccccaaccctcgacagcgactcgcgatggcaggtttcggcggaagtttttcaaaaactgttcgagatggcggacaagcttgacttgaatgggtacattactcccgtccaagcgtggaacaggataagggaccatgagaacttcccacgattgacgcgtgagacattgaaaacactgcagaatgccatgaggcctcatatcaagtgtcaggggtgagtagcttgcttttttctcgattgctaatttgtgtgctaatatatactgcagattcgcagcaatcatggaggaagccattttcgagatattgctaaacaaagctcttggtccgtgattaatagttcttttaccaaatatttgaccaagctttgatttgatgcctgtttcttttctttcctttttcccacttgtattatctgccgttgccaggcttcaagaatatatttcgtgccttctacaaagacccattgtgttattcacactgaattagtagataaactcttctagaaagctccgcagtcaggtcttattggccacaatgcttgtccatttgcctatgtgccttgataaagtaatccaaatattcatcagactgataaaaggggacaactagtaagctggtgaggagtgtctaggtagcgacaaaacccgagccagcacataatgcgcaaaaactacgcaaaaggctccaagcttttgactgagataaaggaactaggtcgatggtcatgaaacacagatgaaaccgtctgttgcgggttttttttatttatgacaagtttaagagcccttggtacggtcgaccgctgcctgttgcttgtaattattcttttgtctcgacgaagtcctttatgagccatgattatatgtcactgagacctctgttgtcatgttgatattttcacccttcggggcaatagtctctaggattgctgtttggcttcccatatcgtggactgtcgtatgtccaatgtccgtctgcgtttcgcccttggagttgtcgaagaccttgcggttgggatacgggatcatgttataattgtccgatgatgtgttggggaatatcatcgttaagagaggcctaagcgcgggaatagatgcagcggtgatagcgagaccatcctctacagctgcccagatcaataagggagcaagttcccctaagcaaagagaataaattagttttatggcgaagatggagaagataacaattggtgacgtacatgtgaagtcggatttggccgagagcgccacaagatgtatggtcttgactatggatgctgcgcctgcgcttgaagagacatgtcagtcagtatgtgggatcaacggtgtagggtctgcaagacttgcaagattccaaggctcattgcgaaggccacagcaagcttttccttctttctcatttgcagtttccagacaatagtccacggtagcagtgctaagacaaaatcttgtgctccagaataggctgcaggagggaattgatgcattagtcgtcaataacgacccaagggtttctgcaagaaaacttaccaccaacaaagagagcgaaattggtaaagacgtccggcggccaacactccgatggaatcatcggattccacaaatgtcgaggatccctgcattgcaggaagacaaagagtgcagccaagatgttgacaatgttcattgtaacaatcacgaaccatagcacgacaaccatccatctctggaccacaatccgaagtaacgtgacagcaaaggacgtcttgccgagggtgcatgccatgattgccaaactttcgccaatattgcacaagagggccacctggatcaggttatttggggttttctggacaatttcgaggtgttgtcctaagcccagggttgcagcgacatggcagacagcagcgtatgcaacgagacaacactatcaagggattgaagtcagtaaaatcatctcaagtccgacagtcacgaaaagagaggagacccttacgattgccgcaattgcaatgccgtcatcccagccaaacactctccgcatgtacactcgcacatacaagcgcatcaaaacgaagaccaaaggaaccatcgacatcgtccacatcacacccttcaccgtaggagcctggctctctatcgggagatgtgcacccccattagacgacatcctgagcgttcgccaacgctgcgcagaatcacagtccggggtgtaccgtaaatctagagattcgacttccccagacgtgggcatgccacgaatgattacacgcgcatgggactccaggagggttgagcattgtcaaccgggtgtcataaaagctacctaggtagaacactagcccgtcccaagaacatggaatatgggggcgaattccgaaaaagttaatatttgtcacataaagtggagctcatgttttctaggtggatcaagaaaacatccaagggatcgacttacgccgctttctcgatttgaaccagtctgtcatccatggcttatgcttggattcgcttaccatggtagtggatttgttaagtcaacaataataatcattttgcacgagcttgttcttaaacggctaattagagccgctgtcacaaagccatggtatctcgtcggacgctagggcggcgccgctggagagccaaggttgttatggccaaattgggaaattggttttatcgaacagccattcacgatcatcggcaatcaatcaccgactccacattccgttcacccccgtctggagacgaacgctaaatcccacttggatggagttcccatgccattggagaattatcaacgcttgttcgcgccgttcattttgttccccgcaatggcccacgttctcacgcctggtgttaaaaaaagggcaaatcacgccccccataatctcagcagcactagcccctaggatctccgaggggcttttaaatgctgcgactgtcaaccgcgttgccggctcgcgaaaacctgactattggcagtgaatcgagtttggaatcgccttgctacactgcacgtacttttgtgtgtgcacagaatccacatctgccacgatgtcggaaatgatcactcttccttccagcctgtgggcccaggccctggtcactctgggtctgcttgttgtgataaagctgatttcagatgtgttcttttcgcgcttgaggtccatccctggcccagcattggccaaggtcactgatttttggcgcgcgtctcacgcatatggtggacgcattgatctcaagaatgtccaattacaccggaaatatggcacagcggtacaggtcgggcccaattgcgtgagcatatcagacccgaatctaattcggacaatttactccacgcgcaatccctggaaaaaggtcggatatgtcatctcctagtcaatatcgtccttttacgtgtgagagtaggctgtgctgacctgttgtaatcatgtaaagagtgatatgtaccgtcccaatgacgtgttgctcgaaggccatcgactgtcgaacctcttcaacacccaagatgaagattggcacaaccagaatatccgacctattcggagcctttggtccatgactaaggttctggaatacgagccttttatcgatgagacaataaccaagtttgtggacaagctagcgctgagattcgtcgatggcgataacgcaggaaaggtttgtccggcagatgaatggattggtttctgtaagcatactctcaaagatcccaaacacccaatgggacctggcatagatagaacctaacacgcatagttgcctgggatgtcaccgccaacttcagttttggtcggcattatggattcattgatcaggagaaggatgtcgacaatttgatcacggactcgactgctggcctgagatacttcgcaccggtaaataccccgatataaacgattcgacgtggctgagggtaactgacacgtacgtcccactaggtctctcaaatcccgtgggttgacaacatcctcgacaagaatccgattaagcgaattgggcccaagcccaccttgacaggcgtcctgtacgccttcaaagtcgtcgccgaataccaagcccagctcgctgaaaaggaaatacccgctggtagtgttgaccacaccctagataaatacgtgcagctgaaagaaacgtaccccgatatggtcgacgataatcagattgtcaactggctgatgctgagcattcttgctggaggcgacacgagctcggccaccatgcgtgctgtcgtttactacctagcgaagtcacccgctgcgacggtcaaacttgccgccgaactccaagccgccggtatctctgcccccgctccatggaaggagatccgcgacttgccgtacttggatgccgtcattcgtgaagctctgcgcatcaaccccggcattgccatggtcttcgaacgtgtcgttccggagggtggattcacgcttcccgatggacgatatctccctgcagggaccaaggccgggatcaacccctttgtcactaaccgtgatttcggagtgttcggacatgacgccgatgacttcaaaccggaccgctggctacagggcaagggcgaaagcccgggaaactttgaggatcgcctgcgtcggatgaaggatactgtcgacctatcatttggtggtggaggccgcgtttgcatgggccggtatctcgctatgttagagatcaaaaagttgattgcatcgttgtacagctcgttcgatgtaagtggttcattgggattcttcggatgccagcttcttggtgctaactcggggtacagattcaactggtggaccccaaacatgaatggaactaccaaaatgcctggttcgtgtatcagtacgatatgcccatggtaattcagcgccgatgaaatggggtgctcgtgtgccaataatggacggacattaacaaatacgacatcatgaacgtgtggaagctaagcgaccagagccgggatctagcaaaggtctaatggatacgcggaagatctgaaatcgcatgcgatatggattgagtagaaacgaatttgtccataccgcatagggtatcaaagtcccagcctagaaaacgccgctaaaccattaagaatatccaggcccttggaaagtccccgtgcatcaagtcattatgtagtaaagaatcgctgttacttcgttcaagcttcccgactgtccatgcgtaacttcattcaagcgtacctcgccgtccaattgtgttcggtaatggtacgtgggtgtgtgcgattcatgtcttgagccgctcaacgggaaagccatgctcatctttagtcatggcttcatcttcgtttttctcacctggttttccgtcattgccttcctcgccggtaatttctccccagccagaacttcttcgactcatgcgaccagtcatagccaatggactgctaatgcccccagtgatactggcggcggtactgtcatttcgactgtgtgattggacaccgctgcgaatgctggccgtatcgccgccggtggtctgcttagtggtgtacaagccaccccgctccgcagtcgtgctagctagcggaattgctccggaggccgagtacacactgatgcgttcagcactagcaagaccaacaatacttggtcggctcagtacacccgaggtattgaacacagaggtattcgatgcttcagtcgtatttccactcagaacgctcagcggcaggctctcccgactaccgccgaaaacagaagagggagccaatccgcgtacggatgcattggtatcgagggagttgcgccgacgacgcttggatgagctcgccaaggtgagaagagaagcgttatcggtcaaggcattgtttgcggttgcggcgctgtacgtcatcgcatggctttggggcacgaggtgtggggggactgcagtagcgggtgaggttggaggaaattggtgggaaaattgaatctgctggtttgaggagctctgtgtcgagctgccatggtggtgtccattgtggttgttttgtgtgttgtacagttgggttgagggtgccgtcgagtgcacagtggtcagggtagtggtcatggatcgaatcgaaggtgcaggcgatgagaaggtactaccctcgccacccccatgggtgctaaatccttcagtcccagttgtcaatgtgcctgccttggaatacgccgcttcggagaatgcggcgtcgccattggttgaaatagttggcgcagcggattttgcgctagtcaggggagccggattctcatagcccgaacacaaagatgggtcgctcctggagcgagatcctgcaccataatggtcatccgtgtatgagtcggtcggtgtctgagtccctgtgtcacggttgatggttccagaaagcgggtatgggttgttttcttgatcgcccttcttgcccttattaccagtgtagcgcttgttggaccatcgatttgtcgtagaatccgaggaactcttaaggttcgccaggcgtttcacccagttggagaatggacggcgacgtgcattccggtctgttttgtatgaatcccttagcagcggttcacggtggccaaaaagcacaatctgaacttaccatgcaccctagcaggaccatcggcagtagtcattctagcttgaagaggcagcctagtcactatcctctctggcttgtgaaaggtcaaaggtaggcaagggagcagagccctggggatccagccgcgccgaggcagatggagcagcgggcggggagactgtttatccgtgcacgtcatgtgcctgccttcaatgttgcctctttgacttctatttgacatactctcaaaattctggacgttgtatacatttcctgagtcatttatgatacttatcgggagggctcaagcagcgacaatggcatgtgatcatgaatgaaactcttttagtcgtgtttccaaaatccaccttgggatctttcttgcatctagtggcgcaatgccccggtgaatacaacaactgcgtcaatgcctccttctcagtcaatgatacgagcgctaccttctgatgtgattgcaaaggtcaaatcatctacgtccattgtgcatctgactggtgtcattctggagctagtcaagaattctttggatgctaatgcacataccgtcttcgtcactgtcgatttcaaacgtggtggctgtattgttgaggatgatggcgaaggaattcctccagtggagttcgaagttacaggaggtctaggcaagcctcaccgtatgtctcccaaccttgacgctataatgtatgctagctaacatatggaatagatacatccaaattcaacctgggtggcttgtatggccatcggggcttgttcttggcttccctggcctcattgtctctactcactgtaacttctcgtcacattgatcatggatgcacaaactcgatcatacttcatcattcgacgcctgtggctcggctaacccctgcgcctccacatcatgcgcttcgctctgtcgaccatggcacgtctgtgactgtcaacgacctttttggaaatatgccagttcgcgtcaagagtcgagctctcgctctccagcgatcagacgagctagaacgtgagtgggaccaactcaggaactccttggtgtctctccttctagccaatcatcaattctcaaaattagtcttgatcgatgtggaacgaaataaaaggatgtccgttcgtcttggaaatgcctccatgcccgaagcacgcatctctcatgatcagagggagttcgatcttaaacgtatcgggatggttctcacacaatctgggctagtcacaccacaaaacatcgattcttggcatgaaatctcagcatcagtttctgacctcacagttcggggagctatatctctccagcccagcccaagtcggaagtgtcagttcatctctttgggaaaagaacccctgctgtcccacaatggctcgaacgtgctgtataacgaagtaaaccggctatttgcttcgtcagattttagtaatgtcggagccatgtctaacagaagctctgtttcacatattacaccttcggtgaatcagcttgatgccgcaagtaacgcaagtactcgaaactgggcaaagcctgtcaataagtggccaatgttctacgttcgcattgacacaaacgctgttatacggttggatgatgatgatgcatctgagcaccttccggaatctgccaaatcagttcaacgtataattgatgtgcttggggccatggtccatgagtttttgaagcaacacgatctccgccctcgtaatggcagaaagcagaccatttcgtcagatcaaaaccagagtatccgttccaaagcctccccaccagctggcggttctcatgcccccttacgacatggtcggtcgatttcgagcactgaagaggcgtttagcggtcgcttgaaaattccctcatttccaagaacccagtctctgaactctggtcaatccttcaacaactggtccagagtgaaaaccgccaaggatctcaaaagacgttctccgacccaacgaacgtctgggctttctcatgcgactcctgatgtaatgcagggcaatagctccttgctgattcaccctaaacataagccaaatcgtcgagatgatggccaggagtgcaccatccttccaaagcccccgtatgaaaggatccgtagtggggacaagggggatctgcctggagactcaccatcagacaagatgatcacttggatcgatccgcacaccaacttggcctatatgatcaatcctcgaacgggtcaaacaatgaactcccgcaagtcattagctacccagcgttcccccactgactgtgtcgaacgcccgtccaagaagcctgtgcaaacgttttggatagataacatgttgggggcatgggacaacccttccttcagccgaacagaaataccaataccaaatctaggcgcagaggccgccggtcagcagagtacagctacttcttcacacgactgcttcaaaggcattggatcacttgatacagcgcaagttgccaaatatcgagggaaactccaacgtcatgcgctcgagactgccgacgtgatagcccaggtggacagaaagttcatcttggctaaggtccgtacggcccccatcactcgcaatttggaggggccatcaaacgatgttctgcttttaatcgatcagcacgcggccgatgagcgatgtcgaattgaacagttattcggggaaatgtttgtctctgctgggcttggtgagaattgggagtcgggtgctcgagtgcgaactgtccaagtcgtttctttggcatttgaggtttcattgacggagggtgatctcttccaaaagtatacgagtttcttctcaacctggggtattgagtatgcgacacaaggcaagaccaactctactgccttgatcaccattcatactcttcctgtcctaatagccgaacgctgtaggctcgagcctcatgtgttgattgacttgatgaggcgtgagatttggtcaagtgaggaagatggaaataagccgttcctgtcgaagagaacattcgaacaggatatcgaactatcagacagcgacgatgttgtacaccagagatccgcctcgcgctcatgggttcaacggatgaatgggtgccctcaaggcatcgtggaccttctcaactcccgcgcctgtcgcactgcgatcatgttcaatgacccgttgaacatcgatgagtgccaggcgttggtctccagcctggcccgttgtgccttcccatttcaatgcgcccacgcccgcccttcaatggtccctatacttgatttacgatccctccctgagactgctgtttcattgccgctagacttggataccagtgcatccgcttatgatgataattacgacacgacttcggatttcgtggaggcgtttagaacacgttatgtaacataattggttagttccttggaaggctcttctatgggaaattggggattctggtaattggaaatgcgcgaaactggacgaaaatatgtacattagctgatacatcaatcaagatttgccaattattcaatctcgaacccaaaccactcgtctttggcgctcattttgtgaattctcctgtttagttttagggttttgtggactgcgtgcgaataagatacagactcggcatcactgcggtgatctttcgcttgcatctgcctatcctccttacaatgacagcccagagtctcaaataaactgacatgaaatccctgtcgtccactttagcctctaccatgagcgctcaaacctgttttgaaggttttacggtgatatgtcacatttcctccaactcaaattaacaaacagaatacagctcgggttttcaatacatcataaaacaaacgattgaaacaaacaatcccttgagtgtttacgtcaagtctagatgtgacatggtgacatagcgaggtgcagctgggcactctgcatagtactcaccctgtacggagaactccgtaagcctgatggatttcatattcttgcatgaacgcgcatcggccagatagatcgtgcaggacatcgaagatttcagtttgaaattgacgtacatatttcatattttgcaggggtccgacgcttacggagtatccataggcactcgcactactcaaatacctcgacgcaattgcagcggtctatcggctgtggtatacagtcgagggttttcttgcattcaaaactaaggtgtcctccgcgtatctctttgatggatatgtattgtcaagaaacccctccgtagacttggcggaggggttcatgcaaggatcagccagccacggacatagtgatagacggaatggcactgcggccggtttacgcggccttgaatagcgatgctttatgatatgatatgaataccatcaaagcataaaggcaatacaaagctcgtatatacgtatgtatctggtatagcaaacatcagattggaacaaatgatggtacttccatgaaccttatctaaaagctacatctatacttttgtaggcctcagggacgttcattagataggtctgtcaagaggtcctagtcaagcgtatttattccaaggattttatttccgctgcttggtttacttttggtgtttggcccagccttaaaccgcgaataagatctttgagctcaaatctttcggatgcgtcgcgctggattacgggtcagttggtgcctgttgatggtgggctctcactggtacggtagcttttgagctggcttgtgggcttttatttgaccatcattggtagtgatggttgcagtcggttttctatatgcaggtctcagtattcaggcagaaatatgaaggcagaatccggggtaaatcatcgaaagtccttaatttggatagcttgggttacttagaaagcccaaatattcactacacgaggcaaaagcagggttacagctacgattgacacagaaacaggtaaaactaaagcgtattttgcattttaggcagcttttaagagttgctcctgtacagaagccgtgaggcaaaaatattgtctagagggtatccgatgtaggaaacgcccagttgacagataacaatcctttttcccaacctgtccttgtttccccagccgaaaataagaacagacaagaaattaaaacataaacagaacaagccccttggtaaactccgtttgggtagtccggggccccgttccatacatagccgcttttccaatgctacatttctcaaacgagaaattgcaaaacaaatcaaacacgcaagtaccacccaagaataaaaaaaaaaaagtaaataggtaagacaagaatgatgggatattcacagatcacaagaaaatgggtttggggggaagataatgcaagtatgcatagtagaacagttaagatgatgttggttagaacagtaaatcgggaataagaagaggtcatcagtcattaggttgcgaaggatggtgtaggtgattgcgggtggaagggagtgatttatccgtgtgtcgtgacggatttcgccttggattggttggtccatgagaggaagtcgaacttgtccttggcattgtcgagcatggaaggaatggactcagattgggactgaagagtatttccgctgcgggagggttctctaggctcaagaactagagagcggcgatagaaggtttgtgcggttgtttcaccgttggaacgcacgcgcacgagctcattctgcatccaagcctgaagctccggaacttcggttagacggtaggggatctggaagcgttggagctcgctgataatgcgagctgtcttcatgtgcttgtcgaagttgatgacagccatttcactgtcgtcggtggagagcgtacgaagagattggttgccgtggtcgacaaaggtgaggtcggtcaggtaggtgccgacgaatgggagacaagggggcacgtgattctgaaggcgttgacggagtacggcgtagttgcgggacacatccacgatgctgcggagctgctcgagggcagtcttggtcttctgcgatacgatgtcccaggtcttcttcaggcgagatatcatagacaagttcaatgaacaaatgatagccataagggagtcgtagttgttcaactccagacacttgttcgcaatcttgacccagtgcttgatggttgcggcccgctttttgggctcctcgaggtacagaatggagtcggcaacgaggtgggcaagatcagtcgacagagttgacatggcccggacattcacagccaacgagcctgtcttcctggtccattccgtgtccaggagttcttcaggaaggatcgagcagaaaatacgcgactccttaatagtgagctggcgggcgagctcgagtgggtcgaagtcaagaatggtaattgaggcctcgccgttcttccattgcctaagcaagttgtgttccttcttgccaaggacggggggaggtaggggggtatcggggtgaatgtattgggcaatggaagtgttggtcttgcccatagaagaaattaagcgaggcacaagcgggccaccaactgcggacaccttgttggccagatcaagcaaccgcttaccagcagtggggagatctaccataagtcgtgtgtttgcgaagttgatgatgaagtcaagggctgtgttgtcacgatcgtggcgccagtgggactcgagccagcccttgaagatgttgtatacacggagacggacaggtccggcggcatggggtgtgtcaccaatgtattcgaagcgttcagcgagggcctcggcaaactcaagaggcgtagtgaagagacggaaggtaaggtagaaggttgagacaaacatggaatcgggggtggattggtgagcagtcagcttctcaataagagcacgcagactaccgcccatcaccgaaccttctttgtaaataagttcgtgtgcgaaagtcttttccaggatgttggcctcagtctcctcgttctcctcggcgagggtcgagtaactcagactctccttcagtgagtgaacggtgaaactaccttggaagctacccccaatatcaggtgaggtagcccgagtcgaggtttgcgagacaccactcatctcagagtcacgtgtgtggctgtgatatgtgaagctgctaccattgctcgtgactccacgcccaaatgattcgctcacgtcagacttgggatgactttcagggtagttgctgtcagcagaggagaaagaagagatgttatccagatgggtggggaggatggcagaattaggtgttgaagaaatggcggtggtgttggcgggagaatttgagagacgagactggaaggatgaaggtgttgtagagtcggtgagagcaggtgttgggggagagtatgtggtggtgggaatctgaagaggaggtgggggaaggcggagtgacaattcctgtcgctcctgttctacgccagtctccggttcatcttgtggagaggcaatgccaggcaagtccttgcccctctcttcaaagtgttcagggtcaagctcaaggtcaccaatttgctcaagcaccaggcgagccttcgccaaacagtttccagctgctcgtacacagtcagtggcagcatccacaaggcgtttcccttcgtctggcatgaacacaagatcatcgtctggtaggtgtgcggggcggaacacgtcgcgtgcagcgtggacaagctcagatagcttctcacacattgactctcgtgcctgttcgaggaacacgctgcggtgggtgtcatgctcacacaccacctccacgacatttaacaactgcctacacgactggacagcctgctgggtggtgacaaccaactccgtcgaggagcgggactgcatgtggagtccgataaacgagccaagcacaccgaggaaggcatcatatgtcgtcccgaggcgttctgatgccaggttctgggcactgatggcagtagaaggacctgaaactgacatacggtgagatatagaaacccgtttcgtagcgacggagaccggtctttgatcaaccatctcagtgcgcatcgacgaccgactcatatccatacggctgtggttcatttgccgcgattccatccgtgattccattcgtgattccagcattcgcgactcagatctagcaggcccatcgttctcgcccaagttgaaactttcggatgcaggggtcggtggcatgctatattggtctatgctgtcgccgggtccatccatctcagcaatagtcctgctcaagcctacctcctcattccacacgtcgaggaatcgaactcctcgggtcacgatcttgaaagctttgagaagcatctcatccaaaatggcctcaacctcatcttccgaaggaaccccgttggcaacttcctggaatttcttcgcagttttcaccagcgaagacaggtcagacagcaaagccttccggattctgcgtagtccgtcgaatctccttaccaggggtgactcccgggtaagacattctgatttttcctgcggaattataagccctgtggtgttttctcggttctaattggtacttaccagtaggaaccggacgccagcgataggccctctcatcaagtcttggtttccaaaatcttttagtgatgacccgcatcctcctcgaatgatatcccagaaatcagtcaaggccttcaataaaggacgcataggtaattgatcgtatgcttcgcagtaattcgtgggcaaccagcctcgattcccagaatctaataatgtaccatcggcccagccattggtgtgaacggagtgtaccaaaatgatatctccctggtccagagggagtgtaacagtcgacggagagacattgccggccgggtggaaaggatagaatgcgcgcagatagttgtgaaagacaggtcttggggcctcgggttgatccatgtttgtgtcctgggtgtcttttggtgttaacggaggggtcatctctgatgagccccaggcggaatagaatcgactcggtatagatttagtgtcgttgctcgactcggataaattcgaattggatttcgagatctttaacggggggatgtgtggcttcattgattccatctcttgtccgttccgtgactgagtaatttcttctccaagccgctgaggtcactgaccgaaggcgtttactcggtaggtgcaatggacatggttcagtgaatccaactaaaaaaaaagaccagtatcgaaggcaagtggcgttggataatcaaggatggaggggaggtatcggatcgccagaggctggtgttgatcctacacaatctaggtcaattggcgctcaaggatatagagtatagggattgaatgtttggaaatgccccaaggaggttgagggcttggaatgccaggagaggggaaggatttaggaactttgaactggacatacaaacacagaaaacaatattaacaggtaatcaaaaactataaacagatccaagcagacttcctttccaggagtccggaatattcaaggtcccggagggatgagtcgtaatgaggtcaagccaatatcaagggatgaatgacccaatgggtaacttaggtaaataatgcaaatgcctatgaaggagaattgaggcaagtgcaattgaaccttggaaggaccgcagcaaggactgtaaatgacgaaagagggattccctattaaggtaacgcaagggcggaagggatataaaagaatgctaagtataagtataactcgcaattgccaccggcagcaatacaaaagtgaggaagaagagcaagaagagcaagaagagcaagaagagctttgaagtaaaaggggagaaagggaaaaagagggaattaagtggaataatagctctggagagttcgaaagggccatcttctgggactcgatcgggacgatccacgctccactggtactgggcctgtatggagatgtaatgtactccgatataatgtgacgggtatcatacaaaagtacgtatttataaattctttcctttttatttttgggtttttttcactttatattttctttttttaaatttcagactttatacgtttaactcttccaaactgctggctctctttctatctcttattccagatttaaagatggagatctccaaaaggcagtagaaaaagaaagaaaaaaaattgaaatcggaaatttgaggaatccctcctttcccagatttggcctgtctatgattttactctgaataccgtagaccctcggcaccctccactggtacaaatgtacaaatgcagaatgtacctcctacacaataactaggctaaaaggtacatctctcatatgtaccaagtctagtctagcactgtccaccttacatctgccgaacttaggtaggtacctaggtactcagagtactctgttccagacctcccactattccccctccaaacgcaataaatcctccattttaatttgtttacaattgaaagtttctcccgcctgggaccaatcatattgccacagcgacataaatcttgtggggttaagtcaggccatgtcttaatgcattgaccgtgtgctagagcctgcagggggactcgatcaatcattaaaactgagggaaggggatcttctggtcgcctgtcaccaatatctttccgggatgggatcgacagcgcagcgaccgggccccaaagtgacagcagccaaaagtctttttctcctagccgttatggtttattttcaccaggttgcaaatattatatccctccgtaatccgtacctcacataagaaaatctcaaatctcaaatccctgccccttgtccagaccccggtctctattgacatccggaccaagctgtatgaacggagtaccatactgagatccccctccatcttttctttttcccctcccgcgtggggcgataaccacaggaacaggttcgcaattggcaaacaggatccacaaacgcgagctgtggcgagttgcgaaaaagtcgaacactgtcgcaaagctacccgatgcttgcctatgttgtagtgaggcatacttaatcctagctaattccaagctatgtgaagccacggggaaattcatgacgcggacccgctcttgtctaagacctggaataataatagatgcgaggatacgggaggaccttgccgcatgaaaatttttgatgtacttttgttgactaacaatagaatgtgcattgcccctcgacccagaatgaactttggaatattcttctgtgaatactttgatgtggcacacattaatgttatttgaccaacacgttccaatgattctttttaaaataattggacagaaatactcgatattcaatcatgggtcagggtcgaaagtcgcaaaattgaataatgacaatatagaggcgaatttcgccctcccatggtctaggcttggagtaattggagatactaagtatggaacttgtaatacactatgacaatgacatccatacgctattctattccccctttccccatcacagcgtcgcacgtcctcccgcagctcgaccaacggattcgcagagctaagtgaacttggtgattctgcagtcgccagtcaacattgaaatgtgcaaaacgcatacttatttctcctaagcacgcattggtcacacgtcacatgttctggagtctttgcctccttggggaagtatagaattgctagttcctgataactaatgtttgactaatgtaagtcagcaaaaagctatcaagccgagccaactagagcgagtgagcagtgtcggcacaaacaaaaataataaaaaaaggtccgaacccgcccctcgtggggtccaatcgatggctgccatagtagtgcaatgcaagccccctccatatcatcacatcagggcaatcgcagaaggcgatctgcgggccataccttcaatgggtggaatgtccgtgccggaggcgggttcgaaccatgggacggaggtgcttagaccaagtctcatatctctgatgtcgacgtgctttttacggtcgcgtatatagatcgcgtagaatattgaggcttctcaaatgtacacccagtttggatatagtcttgttttgaacttattgtctctcgaactctctaaagtaaaaatacagtgaaaaaaaaaaaaaaagtcgcacaatgcaacttatagactgatacaattgacgggtcagcccgcgtctcacactgtttgcttgtctcatctcgatattacctacagcacagatcaattacccctacatatgtatgtgctttattagtttaacttgctagttagtttgctgtttgtttacctaggtaactttgtacattttcgtcagcaagctgcaaagcacacgagcacatcacatcccggcagactcgtgcccaagtagtggggcatgcacggtcgttctcccaaagtactttgtactaactagtatatatccattgtgctactgtgatgcaggacccgtctagttgacaagagatcatcggggaaagtggtatcgttacatatatctgatctgtttaacatgttcaccgaggtcaagaagcccgacccgcatccaggcaaccattttaggtaggagcctacctaggtcgaagcttggggccagtctggatcaggaatggtttctgtgataagacacatgttatgtctctgcttattgtcagtcgtatttttgttgctgtgaatgattatccttcgggtgatattttgttgggctctaaggtgtgtagggacccaggaagcagagagagagagttgtgttgggagagaaaggagcgagctcccatacaaactatctagttcagactacgaacgaggggttgatgccttgaaaccaagccgtccaacacaacatatttccagccgaggatatctctccgagtgcgacgtgatctgtcttctcgtgctcctcgcgtataggaaatgaacggctcaatggcagggttaatcagcaagacgctaatctttggatttaatgctcatctcatactgtatattagttagctttgtggggccaattgccgaggcaagaccagggaagcgtgctagatacctgagtcgatgtcttggaatatcaacgttggcatccgagagtcagtggaacgtgccaaatagcgaggtatatgctatgcggtcagagtggtgggcggggacctacatgtaactattgtatggacagagcctctattggatgtaagcggtatggagagtagcttacttgtaagatctctcctgtcttatcgatatatattcatgaacacatggtaacagccgcttaaaaaaggttgtatattggaccacaacctagttgcgtatggctcagcaacatggaagacatatatccatgcaatatatcatcaggatcctctggtaggaagtcccatgaccaacacgtgggcatgcattcagacaatccgaattctagctgttgagacaagtcttcaagtttatgttgtgtcacctcgtggcattaattgttgagatgcggtgagcggctgaggctgaaataacactgcagttttatgcataggtagtgcatgtacctgcattcgactgcaagatcgcgctccaaaccttgggattttggttatgatctcaataaagtcggtctttgcatcttacgtgattcgatatgcagagagcgctagcattcattttctctaaagttcataactatgctttctcaccgagttttccaacgttctattgatggctgagagcgcgcccgtttcttcgtggcctttaccccacgatcgcgatcctgtaatcacgctgttacgcaaactactagatgtgacccttggtagaacattggtccaaatcatacttaaagcatattctaacatcataccccagcgtgtattatatgttgtgcattgtcgactaagtctacaccccttcttcttcatatatatatatccggtttaagcttttgctaaagacgatgtcgatcagctatattacatcaacttaaaaataccccgtaacaacgcgaccactgaatttcgacattgaatttaacacaagatcccatggatgcgtacggaaccttggtgcctgcctaggtggtcacagggattatccatgcatacataagtttatcgtggataatattgacaagcagttcaaataaaaacaagcatgcagcgtactccatacacataatccaagctcatcaatagaagcagcggaatggcggtggactcagaacaggggttatccattcaacgtccacggagtatactccttactttgtaaagtcctctacagttgtacggatattcataagcagtccaaaaagcagatgcacaaccctggaaatctagatcgttctcaaaatcttggattcgaaagatcaggctagcagttacagggtctagttagcgggagaaagtacccaaaaaatgcgtacatgataccggaccttgtatagtgatttgctagatggtaatggtcaatgttacatacagcgtaagtttccatattgtcgattcaataccaaagcccacttagacccgcgcatgaaagaaacgacccagggatagtcgccgatggggcgatatggaggcaatcaacaaagaaagatagaagctacgcatacatctccactcaccatactccacagttcatttcgccttaaggggaagtccacaaggaaagaaatcctctaaaccctaaaatatccgggacggcctccgcagctgtctagaaagccaccagaaggtgacaccggatgcacacggctggcggattggctagcaggattccgcgcaacggtccagaccggtacttctttccgggattaggggctagtctgcgcctctttccctaatttcatatccccgacgccaccaacagattatacatgatagcttatgttacctgtcaagcactccagggctcggggccaccaaatgagcggcacagtgaagcgtcggctgtataacctctgtccgagatgggtataaaccggggttgggccgccacacgcgatgcatttctttgttaccactttgtccacgatctgagatgctagattaggaccggcgataatcgggcccagagagtccagattcgatcaggcagatgagctttgcccgaaattggatcgcagccttttgtccccttgctttttagcatggcgaaggaacttttgtgcgggagagcttccggtcccaagaacaaagactcgggttgccttagtggaggctcgcagtcaggggctgcctcgaggatttaccatgcgtcttcgcgtggagcttgatgcaccatgtggtcgtaaatccactttatggagtataactgaccattcattggcggtattaattaattgaaaaccctgagctcgataggtccatcatgttttgctctaaaatcaatagtttaacgtccccttaaagtgtggatagaggggcggctgtgccgcagttccagagttttggtacggagtagagttcgaggtcagaacctactcgtctctggagacttgaatgtcaaccttgcttcgggcaatgcaactcaaagaatcgttgggatctccagctgttcgatttctttgtttggcgctgcacgtgattgaattgcaatgcgggacttaacagcaatccccctgtcaactgggacagacctggccgttgcgcagtgagcaggggtttgagagcgtgtgggggaggctagaaaactagcggccctatcggaaagaccgcgtcactccgtacggagcagactattgataactttgtgtcgcgtgcgttcaggccgttgaggggatcaatagtttcactgaaatgattactattgtaaggtgctgaccatgaacctggactccccacattcacgccatttccttggggcgggatgaaagaggggatatgataggtattggattgaacgtatcattatcagaatagtgcaggacggcacggttaaagggatcaccgtcgcgtccgcgctggtgatgtgatagaggcgtcttgtcgcatttacgagggatagtttaatacgaagtacagactaaccgtacagtcgtagtgtgagtcaataatagactatcgaccctgtaatccaactgttgagattgcaggagacctcgggaataaaaaaagcatgtgcctggggtgtgtctgtgtcacgtggaccagcacaccttctaggcaggcacaatttccaatccgatccctcttcctttggcttcagttaatctattaagcaccttggaatggcgatctcattttagaaaaccccatgaggtgaaacaacctccacattgttggcgatcgcatcaactccactgtttccgacatacccagagttctactccgtactccgaagtcttctctatacatagccttacctggcgcaactcatggacagttatggttactgcgtcattctgtggggataaccttggaagggcttgaagcttccctacaacattgtaggcaagccgaaaagccgaaccggttactttgtggtttcgacggcaacccttttttaattcgctttctcctaaactcagatacacaaggaatcctcaacagtgttcgtcgttggttgttctagcaacggtcccatttagccggaaatggaatattctctggagtcaactatttactccagtggaccactgcatcgggaatcaagtggtctagtttaaagcccggtatctactccgtacggaccacacagaagtgctcacggcggagctttggcttttggttctaatgagaaccaagaaacacgcctttttcactccactatcactgctgatctttgcttaactggattacgtgacggaatagacgcgggaaacaaggaccgtttctctgtgaaatcgggaacgaagaacatgccctcaattccctgagactatgacaacatacccgtggactcttatcttgtttaacaagctcggacttacggattactccccatctttcaatggctctccccgcttagggccaggtttctatgaaaggagatttgccgagcgatcagcaaccttggaatccttcctgggcaaatacggtaataccagtattttgtgtgagatgtgataagaaaccccagcctctgccaaccaaatcttcgaagaaacgagaaatagaaaaggggaagcaaaaattttccttttttttcatttttttttttcaaaaacccaaaaaccattaaatttcaccagagtttctgcagaccagctcgtgcgcagatcccgagttcttcacagcgccgaatcggattctgtcactgtggagagttcccacccacgtgcatctcgtcggagaatgtgggatttattccgatttcgcggtttccgcgggaagattgggggtaagctactccatactccgtactcgatggaattcaactatgacaggaggttccatgttgtcggtgtaagcttgcaagcgttagctaatgatcggtgatattctaggaaagcaaatggtcccgttctccaaggctggcccacgatgctgggtcgaccccatcatttccactcgagagatccctttcgcttgtggagatagtccatcggtgtaagattcctttgtattttgggtttacctttccactacctgatcgggaaggtgaaatatgtgtcacacttctagccccggataatgtctccagtgcacaaatggatacatccccacgcgccagctcgttggccctagtgtcgatgcaatttcatcacattgtggagacaggtagggctcaggaagtatggagtacggagtacggagtacatgttccaatatgggcggctaactcggagaaatggaatacgggttggttgtagtatacgtcgatgtgactactcagcgaatatatatacgtcgtatggctttactcacttccttttagactcgtggttatttcaattacatagagtcatgtgcataaacactgtaacttgatcacgtagaggctcttgtataaaggtccgagaatgtacaatctatattctatgctctatgttctaaaatctatatgctacctagtaacattaacatgtacagtgacggtgcataagtttggacaccccctatagtgggtcaccctcaccgccctccctaccgcctatcctaacacgccctaacacgctagtatagctagtatgatctcgcgtctctacgcggttttaccccctacacctcccattttcactatggctccgcgtagtgagcttaccccagcactacgagagcgaatctgtgagcttcatagcgctgctgggtgggggtataaacgaattcagaagcgatatcctttcatttctatctctggggttcgttataccattaaacgcgatcgtgagagaatcggcggtgtcacgaagccccgtactggacgccctaggaagctggacgaagctgatcgtgagaaactgcttgatactatcgctaagaacccgaaaatcactcgtgaggatatgcttgctaaggtatcgtataaagttagtataacactactttatgctattatatactcctttctaaccttttatataggttaaatatgactcaattcgacgccttttaaatgctaagaatatacggaagtggcgttgctcttggcggccttacttaaccgaagctcacgcggttaaacgtctacaatgggctctgaagtatcgtcactttacacctaaggattggggccgagtctattggtctaatgagtgctctattgaacgtggtattggtgttaagtaagaatagacttttatacgcccgcgggaccagcctcggtaggggcaatgtcaaggcttaccctataagggtaagcaagtgaagcagatgttttagggtgctttttgtggtgatttccggcgaactggtttaattcccctttttggagacgcttaatctaagagggggggtattaaccgctttgttattaaagagttatatcgtcgaatcctacctacattgattgtgcacgaggatagcatttttcagtatgataatgcgccttcgcacactgcaatcattgttagggaggctctagatgagatgcaaatcgaggttatagattggccacctatatctccagatttaaacccgatcgagaacctttggtcgttgttaaagcagaagatatatgagctccgacctgagctgattcatatgcgtaataccgatgaaacaaaggacctgctaatcgctactgcgcaagaagcatggaatctgctggattggaagcatatagagaacctatctgctacaatgccgcatcgggtggaagctatcattgaaagtcagggctggtatacaccgtactaggtagatgtcaatggaaatccggaggttttggaccggcagaatattacataatattagtgggtggggtaggggggtgtccaaacttatgcaccgtcactgtatgcaggggagggaaaagttctcgatgacagaaaacgcagaaatgcgcggtgtagggcttcatgcgtgaaaggccgcgaagtgagtgtatgttgtataacaggttaacaagaaataaccagagaatggcaaaagaaagatcggagaaggaaaaggctcaatcaatgagcattccgaagaaatgaagggcttggagaaaaatgatgaaacgatcaacctactcggccttcttggaagccttggttctcaacttcatgagtccaaataccaaggcatatccactgatggcgaagatgaccgagataccgatatctctccatccggtggtgtagttcatgatattgagatttctcaggaaatcacttccgtctgtatactggcagaccttgcaggccgaggtagcatcggggttgaccaaattgatgcttgagccagcgccggacatataatccgacaggtactgcgcgcaggtggtgccgttgagcggctcgaacaaagcaaattcatcttcattgcaggtaaccttggcaccccagaggccgaaggtcaacatacccgagacaacgtagttgaagggattgaggtagtacatccagtaccgccagaacacgttgagctggatgtatgggacgaaaataccgcagaacaggacaagagtactgatgatcaaggggttgacaagcgcagcaaaggtcgggttaggtgaataggcggcgacgaattgaccaataccagtgtaaatgagctcgtagatcaacatcatgaagaatgtggcaccagatcggctcgactcatgaggcagtctccagacggggtagtaccagcagacaaagtagagaaccgcacagatgcagagatacgggaactcggagacaatcaatccggtaacgaaggcaacccaggagtacatcttcgacttcttctcgcgagtatcgtagatatcgcggcgctggatgaagagcggttgaagctggttgatgacaccgggagcgacgaagacaaagttgaagatcgtgaacatcttcaggttcaaagctgacacacttgggccaggacgccagaaagagaacccattgagcatggctgagataatgtgaagggagaacttgttgttgacatagttggtgtttcggaaaagcgcgacattcatccgatgagtgacgattttggtctgctcccaaagaggcatggagaattcgaatccatcatcgacagttccggggggcttgctagcagcatccgcaatcattcggtccagttccgcgatcatgcgagtctgctcaggagagtcgagccatatctgatgccagtccttgtccttgacagattcgataccaccggtaacaacgtcaatcataaattcagctgcgttagcatcggtagggcactgggccccatattggccaaagtattgcttaacgcaggccgcattatcgccaatgtcgccaaagtagacagtctttccgccctttgcaagaagaaggagagtgtcgaattgagcaaagagctgcgccgaaggctggtgaatcgtaacctagaatgtcacttgtcagcaaaatggtcttgtagttgttgaattggagaaatagaagacctaccaaaacagcttgaccaacatcagccaatttgcgaaggaaacgaacggtgttataggccgattgtccatccaaaccagaggtgggctcgtccaagaagatcagaatgctaggcttggataccagttccacgccaattgtgacacgctttctttgctcaacgctaagtccattcccaatagtaccgataagagtgtctgccaggtcatcgagctcgagaagatcaatgatggtgtcgacatacttgagcttatctgctttaggggtgttgcgagactggcgaagaagggcagagaattctaatgcttctctcacggttgcgtatggctcgtgaacatctagttgttcgcagtatcccgccatcctctggaaagacactgggagctcacggccatcaaccatgatagagccgttgatagtaccatctgtcttacgctgagcaagcacatcaagaagtgttgtctttcccgcaccagaggagcccataagggcgcctagcatgccgggcttgacccatccgtgaatgttatccaacagcactcggtcgcccgtgggggtttggactgtatacgtgaggttcttccaggtaaatatcgatgtgtttcggttgagattttcatcgtcaacctgaatgggctcgtcgggagtctcgcgcgtagtagacttttcgttattttgtgcttcttcgtcggagacggcggcatgatgctgcttgagcttctcgcggggaataagaagagaagagccagcgccagcacccgctttccagtaggatgtgaaaacaattgtcaggatggcgaagaatccccaccagccccagacgacaccgaagttccgccacatttgagagtgcttgtagtgaagtgatccaaggtactgatcgccggtcacatagtttgcgcctggcaaagcaccaccaacacccgcacaagcttggttctcggctccgacttcctcgtagccagggccacttgggatcaggttgttaccaacacaagggatatggcgcccatggaactcgttcgacatggcagcttggaaggcataggcaaaggggttcgtgtagtacagttcgaggaaccagttcttcatctggggcttgggaatcatgtaacctgcgtacatgacaatgcccttgactgcagttcccgagattttagacgcggcttcgaatgtactgaaagcggatccgataaatctgaaaagagcggtgatgcactgaaagatgtaagagttagtccaagtcgacaacctgtcagaatcgaataagaaaacgactacttaccagagtcgttgtgaacaaaataatccagaaggtaaagaaagcagccgcagtatgtttcaagccagacatccaatagatgacaaccgagaagatagtgcactggaacaacagcaccgggaaatccgccatgatctgagccaaggaaaacgcagccgggtggtacatagcaaagcccttgtgtttgaccaagaccggacggcccttaaaggattcagtgacctcagacatggcaacgatgcagttgtacaaaagcgagaagaatacagcgccacccttggtgaagagacctgcggaagtgtctggcgagtcgtagaagcaagaaccagcgatcaacgccatcacacatgacagaacctgtttgatgatgaatgttgacttctcaccccacagaatctgatactgtcgcttggtgcatgcaatgagctgaacccaaaagctggtggtcagactactacccttaggcaggtggctggacttttcccacgcaacagactctttgaaggcatctgtgcgttcgcggctgaggttggagtcgggatagtcatatgttgagaccatacggtcataaatgctggactttttgtattcggccaaaatggcatcggcgtttctggggaatgtgttttcgtatccgggtctgattttccgctctgtcgggactgtcacaccggtgaggaagtcgcctatggttttgttagttgatactaggcttggttgtcagatgtaggaaatacgtaccgatgtttgctccatcagtgtacacgaagcctaggtcttccatgaaaggcttagctgcagccgcaggaccatagtagatctgctttccctcgtcaaggacaaggaccttgtcgaagagattataaattccatttcccgcttgatatagggtcacaatggtggaaaggccgagaacatcagtcatagcgcgaagtgccttagcccattccaatgcggtactggcatccaaaccacgggtactgttatcccaggagtaaacagaacccctagtcgccagacactcgataatagagactcgcttccgctcaccacccgatacaccacggacaaactcatttccaaccttggtatctgccgtatggctgattcccatagactccagaagaaactgtttggtctccgctgtgtattcgtcaacactttggactccctccggtagatggaaaggaaccttgagtctggccgcaaagtccatggtctggcctactgtcaaacgtggatagaagagctcttcttctgtgttcatcacaatctggccattatagtcctcagcttccttgggggacatgcttccgaaacgtacgtcaccattcacggtgtgataaccttcgcggcgatttgacagcatcttgagcaacgtggtgcaccccgaaccagggcggcccaacacaagcaacatttctccgggcttgacacatccatgactgtctgacaagattgacttgagtggtggctttcggcgaaaatccttaatcaattgaggaaggttaaattgcgagatcatgttttcgttgacggcggcttcggcagcaaggacatcgacggttaaactttgccatgtaacacctagctcgcgcttcttgaatccagcagcttcgtcacgttctgcattccggatcacttgcggtgtcatgctccattccgcagtcttcttggggggtattgaagtgtcggcgtgagcgacattcaaagtctcggaactctttgcttcgtggatgttggcctggggtacatgcagggtctccacgctagtaaaattatgagtgttgagcttatggatgggctggttgtccgggcttttgttatcattttcgtcttcgttctggtattcgctgtgcagcgatccatcatcgaggccgggatgctgctccatgataggagacttttgaaagagtggagattggtcaaagaagtaaagatatagaggcacaagttatttaacctgggaggtctagcatatttatcctataaaattctacaaaggggcaagtcattatatgtgccgactccagacccgaaggaataggagattggaaggctgatattgaatagccgttccctattggctaaacgaatttataccatgattctgttcattattgctgctaatgcagaggccgttgtttcacccctatgaatagatccaaaggagcctggaaaacccggcacagaggccgagttccatgacgaaacccacttttgggcaaatcttgggttgagcgaactgcaaatttccaggttgtccaaaggctgttcaacagctaagcattggaagccggagaattgtccggttcacccggcttctattgtgttttgacacttgagacatttagggctgacagtgacgttgcagatcactgtaaaaagtacgatggatgttatccgtggataatgcattagtaaccgattgttcctgcttcttattttgaagtggattgattactgtcaactgataatctctggtgatctatgtataacttctacgcgacgttcgtaggcggccaatctgaccagcatattaacgggttaatgtttacatatttctggataaagattagtgttctagattaagacccccggtcaaacccgaaatcccctaaaattgaactgtcaagacagtgagcaaattagcaatgccgaggcaccgaaaccgtgaagattccatgggctgataatcccgataaccgggttcccggggatcccgatctacccgagtcttaccaaattgaactctggcctggcgtcttcccaatcaggaaatatgtgccttgattcccaattaggaaatttgcgactgcttgcccggatccattgcgggtctgccagaatctggcgtgctgcataaaaaaagggccatacaaaagtccatagttgcaacttcactagctgtcgtgaagtgttggctgcctgcattggaattttgaagtttcgcagcgatatcgtgtccatcgttcatggtaatgggacactttgttctattggccctcgagatctttaacactcgagtgcattatctgaagaggcaggtagctgcgggagtgttgagaggtcgaacttgacatagcgacaggcaaattgctgtcgcccgttccaaagccaaccacctgaagtaaaccgattgagtgcgtcagggtcatgccttggatctacgataccctctcatagattttgggattgatggaagaaaggaaactgtcatgcgtgcatgatgggggttacggcaggaaagcgtgacccctagaattattcttaggaaggggcctcgggtgcccttcatatctagccctagagtgtttgagagtgagaacccgggaaggtgcgaagatgtatcattttgtcattaagcaacagcgtgttgtgactcgttatgtagtaatagctattataggtacgaagaaaggacttttcacgtgtggcactaaaaagacacgcgacgatacctactagaccctttttgcttcacggtactagaagctgcagaatccttactcatatataggtactagtcgggatgatacataacagcctggaaactctaggtcccggaattcatgttacacctcctcctagtagcaactatggaagtaaaagccgaccacaacatccttcgaacttaatagtgctacggggaggcaaatttcacctgactacatacctgactacctgacggcctttccgctgtatctcatatgctaggaacacgtccacggattgctcaggtgtgatctgtgatcctaccgtttgccatacaataactgccaccactaatcatataatttgcgtgtcgcaaattacatatacaaacctcaacatcccaatttctagacgcgtcgtcgcgtacctaaaatccctgacgctgaagccaaactttctcacgagaaggttcaagccaccggaatgaggtagctccgtgtttttaagtcctctggtatgggtcttagctcttggctaagaacagcagtgggggatgtagataagaagggcctgtctggcacgcgttggaagcgatctctctctcttttctaatatatccgaaaaatcctctaaccaatatacctgacaaggcataatagtaagtgaccccttcagatacgcaccgagattgttagtgctattatgtggactcggtcactgatgtactataggttacatgtatatatatcctcaggaaccaacgacaccagtctaagccgatccaagaagccggcacaacatgaaactctcggtcattgccaccctctgcttctccgctttggtagcagcgaccccaatcccactcagcaacagagacttcctcccgaccccaatgcaagccgtggagaaactgttccctaactcggggatcccaaagctggcagagggaattgggaaaatattggagatttgtacgtacatggttttgcatcgtgttgaccaaaatgctaatgatatatcctgttgtttctagaactgggcggtgatgtctttcttgggtataggattgaatatgccagggggctatggggttgacgctacttttttcttttctttgcttgtgggttgtgcagcaagtctgccatgaaccgtttacgctggttccatacgatacatatatccatttataatactgcaggagtgtcgtccaaatgaaacatatcgtttaccaaaacatagattggacacctgagtccatagataccaaagataaaccatcacaccaactaaaacatgccctccatatccaaatcgaggaactcaggattgccaaccgccatatcggccgcattaagcacatcatcaatagcatccatgccagccccagaatcaagccccatatcctgacccacaccaataccaccatccatgccagcagccgccgcatccgccgccgccttatccaacatctggttgatattatccggatcatcctcattgaccgtattacgcgcgacatcagcagcagaaggctcaagatccatccgatcctcctgcccctcaacaccaagatgcatattctgaataatattcgagacatcgatattcgagacctgcgacggcggcgccatgagcatattaacccggcgcgaaagtcgaaccacgacctccgcgcgcagcgggtcactctcagagatcttaggcacgttctcgtgctgcagcgccaaggcatcgcgcagcgtcaggatcgcgcaccgcggcaaaggttccttgctcgggtcgactgggtggtagttgttttggtcgacggcgaaggactccgtcatcggtgcacataccattgtcgtcgcgatgtccagtgcgatatgtccactgcctgcttcggtctgctgcttgacttcgtcgattatcgcgctaagcacgcgtgttgcccccaacatgcggattcctgctagcacctgccggtgcgtgtatgcgtgtggggccatgctgattcctgggttggcgctccagaggacgagggattggagagttgcgcgaatgctggctattagcccgcctgtcgggtgggaggtccaggtgtcgagttcggagcggcggcagctgccgacgcggcggaaggagatgtatggctccaaggcatcaaggattggtttgatatctgtgcgcgacgtgtttcttgttcggacgttttttagttgttcttctaatgggcatccggttatgttcaagactgtttgatggatggcttgagcctcgccggagattgagctgggtttgactagggagtggagggttttgatggggattgtggggtcggtcttgtcggtctctgattcccagatgtggttgcccagccatgttaatgcgacgactagggaagggaggaggaacggctcgagcaaatctgtattgtggttagctgggtatctaatggaaagcgaccgcgtgacgatgttcttacattcaaacccgcctttcaaagtgtcgaaatccagcttcccggactcacatgcaccaagactctgatcgaaaagtgttgttacaagcatgtaaaattcgtgtgggctgcaagtggacatggtctcttcgctgatcccctcggcaatgaacagagctcctatccaagcgccgagatctttgttttgcttctcgctcaagtcgctcagcttctggctgcaagcgccccggtccaaaagcttcaacaagaacgagtcgttgctcgagatacccatatcagaaggactcaagtcatagcggtatttgaacgcgagaacaagcaacaagatactgccaaattcatcatagacaggctgattttcgccctggtcctcgtcccacttccaggaatccaggacagcacaaagaggttgcaatacttgctttgtagttcggaaaagcaacatgacgtccaaggtctgcgggcggcgtgagagcgagttgcagatgttcttgagcgtcattgtctccttctgattacacaaattatgcatgaccttgaaaaaattagcatcctaatgctttcagaaaacacacatcagtagtatgaaacatacctcgaccacggcgccaactatcgcgcctgcattaccctccatcgactcgatctcaccaataagctgctcggcgcgttcatgattgttattgatttgcgaaacgagatcgtccttgacataaggccccccactagacagtgtctgcatggggttttctccgagaagctgctcaatgctagattctcgtatgagcttatgcgaggcacaagcaaagaggaactcctgacgagcatctgataaaacactgctgccctgcatggagaacatctgagagaaggaggggaatgcgttcggatccaaacggcttaaggcgtggctgatacacatttccattgagatcggcaccatggatgctgctgagatggccgcgaaaaaggcgggaagcttgttaacaaggaaagatcggaacaaaagcattgtgcggctagactcattgcgatatactccattggaaagaacatcgaaggctgctgtgataatttcctcgatgaggacgtcattgtggccctggtaaggggttagttacatgttctgagatgctctttactagtgatggaaagactctgaaccactctgactagtgagaaagaaatggatcgtattgattagacttacctgatatcgattagtgaggtagttgatcagaatggtatcatcgaccagaggacgtccgacaacctgttgctagtcagtcacgaacccaacatcgcagtgtagagaagcgtaccattgaatttatgtatacatagagtccagctctagtgttaacaactggggcgtccatgacagaagactcaagctggagggcatttacattcacgccgtcaataccaggcccctccaaagtcttagaaggctgaccaggataaagatggaacactttctgcaactcttcgaggcgatgtcgaagcggcagagagacatcgatacaaagaggcagataacttgacaaagcctgtcccaatttcgttttcaaccctagcggaaatcgttaatagaccctcaacggatatggtagtatcatctccaagcggagaccatgtagatttaccttgattataatcgctggacagcacttccagtcctttgctagtcccagacaaagccgcaagtagaatcccaagcgactcaaacaacgagaccgcgtcaggtgaccccatcaagccacctgtgtgttgcgaggcgcccatgctgttattgtgccacgccacgacagccagaatccaatctacggtagcagagtaaatatctgcagcctcgatcacggtcttgggaattgagccggtggaaataaacaccatgacatcctggatgactttgatatccgtcatgagagtggatggtttctgcttcttggacttaggcggcgagctctgtccctcgccctcgccctcgccagatcccgacccatccagaacagaagaatgcttcaaaagactcgccagcgcagatgaagacttgaccctcccaaccttgcacagtccatcgacgtacaatggcaaaagagggtcccaggtaacactggaggaagcgcgcgcttcaaggagcagatcgaggagctcattttccttcaccggcgaacgggaaaacatcagccctgacaagtccgtgaactcgtctatatctatacgattggccaaacattggtggaggaaggtcctccattgttcggggattgccctgtccggcagcattgtcatctccacaacataacactgcaccccagaagctagatatgagattgcaagttatagactcgcaataagcatttttccttagaggaatagatcgctggtcttgaggctgtgagggatagctctttctcaggtcgcgctccgggctcgtgaaagcaattacgtaattatcacgtgaaacaatatctcaatgcaccacgtgacttgaaatatttctaatgcctcaggccacgattcaatagtcacggacattcttccaaggtttgttgtacaagcattatttaaagtcatgatgacagagacaacacccgagtggacctatgtatctaatattggacttacttggataggattcaacgagagttatggcattgacattcagtcctcggcgactctgataagaatctagagtttacaactttacgagaccacacaattatttttaagttattcattgtatctcattatcatcatgacagtcccaagtgcagaaccaaaacaaacagcggtgctcaagtggggatatcaatcgaatgcaacagtggagaaaaccaagcgcctctatccgtaacccgcttgacaaaaagggtaaaaagctatttaaatgaaaagaaaatgcatcaaagctgcctctccttaagagaggacagaaatcgtcacagaacacctcccagaataaatggggatgcgactaatttaccaccagtcaccgtgctccttcatggcctcagcgaccttggtgaaaccagcaatgttggagccagccacgagggaaggaagaacaccctcagcaggggtgacatactccttagcagtagagagaccgttgttgaagcagtcctccataatcttcttaagacgggagtcaacctcctcacgggaccagttgacacgggcagagttctgggccatctcgagaccagagacggcaacaccaccagcgttggcggccttaccaggggcgtaccagatggcagcggcaccagggttggcatcacggtgggcctcgaagacatcgatagcctcctgggtggaacccatgttggagccctcagcgatgaacttgcagccagcggcgatgagagccttggcctcatcgccggagacctcgttctgggtggcggaggggagagcgacatcgatgcggccggcgatgttggtccaggggcgggcaccggggatgtacttgaacttggagctgaaggcgtcctgggtagcgagctcggcgatctgcttgcgctggaccttgatctcagcgatggtgttgatctcctcagcggtgaaggagccctcctcgccgttcaggacgagagcaccctgggagtcggagagggagatgacggagccaccgagctcgatgaccttgagagcggcgtactgggcgacgtttccggaaccggagatggcgacgcgcttaccagcgaaggattccttgccgccggaggcgtgctggatcatgtgctcgacgtagtagacgacaccgtagccggtggcctcggggcggatgagggaaccaccccagctgccacccttaccggtgaggacaccctcccactggttgcggatcttcttgtactggccgaacatgaaaccaacctcgcggccggtcacaccgatatcaccggcgggaacatcggtgtcggcaccgatgtgcttgcacagctcggtcatgaaggagacacagaagcggcggatctcgttatcggtcttgcccttggggtcgaagtcggatccacccttaccaccgcccatgttcaggccggtgagggcattcttgaagatctgctcgaaaccgaggaacttgaggatggaaaggttcaccgtggggtggaaccggaggccacccttgtaggggccaagagcggagttgaactggacacggtatccacggttgatttggacctgaacggaattagcatgtggcaattaattagacattttcaaaaagaaaggtcttacctggcctttgtcatcttcccagacaacacggaactgaataacacgctcggggacagagacgacctgaagagccttgcggtactcgggcttcttctggaaaagagtggagttctcgagagtggaggcgagctctgtttcgggattgttagctgagtcaccccgaaattatgcccccggtggagccaaaggccgggaagatgccgatgggtaaaggaattgagtcgggaaatagtgtgtgatatggacgatatggaattgaaataagaaagggaaaaattaaaagagacatacccttgtaggcctgctcgaactcaggctcgaagggaaggttttgcatcatttcggccggtactgttaactctgcttttaggtaagtagatcaatgctaagcagtgatctaataaattataaataaagacaagagcagagagagtattaagacaattgagattcaagagagtagatgagaagagaagaaaagaatgggatgggggagtgtacaattatatagagatgtggagagagagagagtcgaagccggagtcggacgagagaatccgggattgattggagggaagacgggagatgggttaatgcgcctacaagtcgacaataatccccaagaccaggttgcacggggaattaggataaagatccaagagaatcgatgaaacccaatgatttgcctttccgtgggaagaacgtccgaagttcggggcccgaacaatgttatcttatggtttaaggtcacagaatttgcacagaatttggcttatctctcccactccttttggtcccatcaccttcattactacactttaaccttcccatcaatcacagctcgtttttttatccctaaatcttccttgtccctaatatcccttccgtgttcaattcgtgtccttcggatcggtcctctccgacaatcttctgaataaataaaatgttaaaaagtaaatttaacctacctaggtagtttattaggaggctgagagaaaccttactctaagtaaagaattcgaaccccagaaaatgcatgatgcgacgagttggtgcttgtactatgatcgacctattatgaagtagtatcctataaagttggatggaatcaaccaaaataggaaaaataggaaaactaaaatcgaaataaacgaaataaacgcaaataaaatctcgagttctccgccaccaactgccaacttcggcaatttgactcggctgcaggctctgtcacgtgcccactatcccataaacggcgatcaaaaaatggatcctgctacttttggcccaccgagcttatctgatcgtctttttcattctctaacacgttttactcattcctcctttatctacagcgtttagtttaagcaattaatcacttcctttactccacggaattgcactgaggggtagaggggtagaggggtagaggggtatccccccagatgcaaatctagtcagaatgataaggggaaaaagaaaagaatccgtactacagaatgttcatagtcatagaaatccagaaatctgggatatccgaatacccgcagtgccacccagatcccgaatgtccagtcaattgccccctaatagtcatcccggtgggtgcaacccgatttcccagggcttgtcctttcccccggcttgggtcaggcaccaatcccgtgtgatgccaagacccggttaactgcattggatcatcccccgatagtcggcgttgccaagcacaggatactccggatatgagatgggatatgtagctcttagttgatccctaatcttatgatgaacatgatattgctgcagcattcatattgtcctccagtataatggtgcatcatacggtgttcactagaagaaaaagccaaattgcaacggatatcatgatgtttgggacattggtcgatcctcagcatcatgcgaccgcccagcaatctagtggttgcccgctgcagccctccgcagaacgccagaattcgggacgcacctccccactccttactgatagcgatttgcggaggccgcgcttggcttcctggggttgctgcatggatcttcaccgagaagccaaatgtagaaccaattctcacacgggccatgctccgtctttttcattttcccgacacctaatgtggtgtgatgtgtgatgtgtatacgtaactctttgcacatcaatgagtcgacatcctgactgatgaatcgtcggtgcacatgaccaccaacgcacacagatgtgggacaaggccccgtcaggacccagtgggtttcccttgcagatccagaagcttaattccttctagagctctctagcctccagcgctgtggactaaattcctggttcccgttagtccctaatgtctgcatatgcgttcttatctcggagattcggaacgttggatcttgggttcgacaacgtgcttgcatgaaaattgcaaacgtggacaccacgtcgtctagttcatcgggtagatctgctagattgcgagtagttcggcgtcttctttcatgttttgcgtactgcgccgtgatcatatgtacatgcagatagtgcttgggttcccgagtaaagcacattgacgttaacgtccttttgctcaggacttgccatgacgtgctatctaacggatgagaatcggtgtatatcacaaactcatcgtcttgacttatatagaaggtcagtttattctaataatttatatacatcgaactactccgtattacaggtacaatatacaacatgaactattctccactaagaacataatctccgaggcttggcctggtcgatccacacccttaaagcatggtccaccacgtattcgccattcagacaaagacgataagcctagaaatatactaactccagaggatctaacccacggctttgctaagagactatatatacggtggcgtttgccaaagcagcctaatatcagaccacaatctgacgacttcgataatgatctatatgcagataaccatcagcattccaaccaagccacgtggaaatagtaacgagcctcaattccacactagcctagcagcaacttgactcatccacacctgcccccagcgcgatgtccgaacccatcaaaacccatcctaatattggactattaccaccagaatatctgtactattatatacatttatctcgcacctaccacctacctataaaatataccagaccttcaaaaaaacatatatgcacatacctatgctattcaactatatccacttacccacaagtggatggtgaacgtccatttccccgggcgatcggatctcaggaaaacggcgtactccgcaacaaccgatcccgcacatcaaaagaatattaacaaccttccgattcgtccaaatttccctatcgaggataccgtgcgcccatgacacacaggtttacacaagatcatcggctagggcgctgcattcctgccgaccaagtgggatagtgatcgccagtgtcgcgctattcgcggggtagggatataagattgtacatattatgtaagagtggacaatggaggagagggttaaaataatgtgatggtcttcgctgtttgctattgattttcttttcgttacttgtgccggggttgggttatcatattgacctgcctaccgctacatggtgacacgtgtcggctttggggtgtgaatcgatagatcatgttcgacactgctcggatatataaatgctggtgatcttgctgcagggggtctagggttcaccgtttttcccttcttggcggaggattggtgtggtacctgtgcataggttcttcaccgcgacaaacgtgtgagggatgtgacgattgcacacggcgagttgcgatgtcaattgaggatattgcgatcgatgacaccgacaccgcgcctcctcgttgttatgggacctattgatcacaggaaaaattcgaccctcttgacatgacctgaatatggcggtcggcgggacatgtctgtgttctgcatactgtttgggcagtgatactgctggtgtcgacgaccaactggaccgaggctgcaacgctacagatacatcatactcgtatgatcttggtaatgaaccccggtcgccaactcgctggggagctttatccggacatccaccagctgcagtgtatagcacttgatcatgcgatggtgtcttggaatgacacggtatccatagcgaccggcttgtttcaaatgcatgctttataccaggcgcagggtacctagatatggtcattgggcagtactagcttggaattctccttaatttatctacccgctccgcaaccttccaggggtatccgcagattctagccaggattgagtacttgttatcgggttcgggtgtggcacacaagttcagaatactgcatcatccggtaggacccgactcatatggcatcggggatgtgtcataacggtccggattgttgcgtcggctccgatgcaagaaaagcaacgggttgtcatcactgcagattaaagtgctgcgttggggggtcttggggtcttcggtgcatatcatagactatcggtgagacccgggcaatgcatcatgatcggatttggcaagagccatgcgaggcagtcacgacctatcgagtttcgagtggcagtacttggtagttgccagagagtctattgcatcgatgcatccccagccgtcccttcttgatttattgaccacttcgttattctgactggttaacttggactgcaagagagacacaggtcatatacaacatatgtacggagtagctgtcaatttgaaaagggagtggacctggtgctccgcatgtggcgaattccacgggaataacggagaacagagaaacagaaaacatattgaacggaaggttcggattcatagaaaatattgaaattgttgtgagatgaatgaattaaactcgacccaattgaaatctccgacattacggagtataatcccaaagaacgaaaagaagtaataaaggggatgcgacacgcatagttcttttacttccccctagctcggcgccaccagattttgtgcagctgaaaggacccatatcgactccagaaaaggagtcggaaaaaaaaaattgcaccacacaaataccgagatcgaattcgtaatcggcattcaatatgatgcagactccatacggagtactccgtacagagatggtcattcctcctaacgatcagctctgtcatttctcatctgggcgcgatcgggtcagagcttgacctctccgttaaagggggctctcgactctcacagctcgatgagtggcccctgctctcccgtccgcgggtgctctggccctttttttaagtagatcctagctcgtgtgctctagtgacgccatatggggctgcctttgtttgtgtctcatggcccctgaaggaaatgggactgtttaagaagtacggaataggttcgaaatacatatatgtattaaaaatataaggaatcttagaataaaagatggagacaacaacagccgaagtgggttccgggtcttgtttgctgcacgcgatattgaagaacccggtttgtgggaacttggcagggggttacccgtgggcatagtagccaatatacagatcaacttgctgtgtttgacttagatatgtcaatccactataaaaacgtcaatcccaatgtaattcctgattcaattattgcgtaaaatgttggtgtccacgctacggattacactgcagggcacatggtccaatatatttaatactgtcccctgatcagtcatccactcaataagcagcgctgacaatggaacaggcagaagctctcgttgactacgaagtacctcccggtaatattccaatcatgactaggcgccttgcagcgagtaggccagcccgggcttagattggttgaatacaaactaggaagttccattcatgaagggacccccttttttttttcttcctttctgatccagtccagatccagtatgattatacgaagctatgtcatgaccagaaagccttttaccaaaaggagggtatcattaagatgtcatcttgatccgggccaataatacgtggaagacgtgcaagacatgctaagttgaatctgtaacaacaagccaagattaagattgatagtaaggatgtacctatgtactgaatttaaattgtaatatcagcgtaataatgtaaaataaaataaaacctcccccaaacccaaccttggaaccctggaaaagccctagatcgatatccacacgtcgacccgtggttaagcagatctcagactgattggcctgaccggatagacccgtcgatgtcgatggatccgattcaaaatcctccgtactccgtatacacgttgactttgggctcttattagtttctattctatggatgttccagaacaattttgatatttttttccctttctgattttacttcgatttctatcttccctttttctatttccctttctattcctctttctgtttctctttctctttctctttgcctctttggggaattggaactcacatgtatgtctacggttcttttacttcatacctagtatccccaatgggtattccatgaacatcccccccaaatctctcgtctggacatcctagatggtcccctaacagatgtccatcaacaagccccaatctcgtggtggactcgggaccatcagggatctgttccgatctgcaccgccctcccctacctccccttcacgacgtcgagtatctctcctagttcgtcgaggtagggatattttctccaagtaacaatccctccccccgtctgcctttcatcccaactacccctccagttcactcaattcggggccgcaattcgaccccactggtttcccagaacgcgggaaaaaaaagacgcacagccccgaacagaccagcgaaatgagaggacacaaactaaagaatgcatcgggcaaacaaatagacaagtagatcctccaagactacaaacctcaacctcaacctccacatcctattcacccacctcaccacaaccatccatgaactcccatccacaattcgacccggccaccatggtcggtctagccggtgcctccccaggaagatcagacgacaacttcgatatctttgaatggtacccccgctatcaaagctgtcaacgctacttcctagatcacgcccagcacagcgtccccgtccaggccctctccacattcttaaacatccgactccccttccagcgtcaaccgaatccaatcttcaactcaacaccatcctcgtcttcctcgtcttccagccaaaccccacccggcacacaaccccccacccccaccctccatctcattgatcccctacatccgccgcctagtcgcaacaggcatggacttcccaggcgtgctgcacggcttcttcggcgacgactggggcagcggcgtgggacccatgcacgagcaagaacgccgcaactacctcttcgccgccaagagcggcggctgggcctccgtgaaaaaggactacgacatcgccccgctggagaccatcccgttcctgcgtccgttgcagggagccgtcgaggccgagatcgaggccgccgagcgcagctggagtgaatggctcgctatggaggactggatggttggtccccgggcgccggatatcatgcacgactcatcgtcgcagaactcacggccgcgaagtgcgcgtggctgaagagattatttcgactcttgtcttttcacatcgggtcggcgacatggcgtccatcagagccctgttttggttttggttcttcacatctagcgatcttgtttgtttctttgcttctccagcggcgtcttcttttaccagcattaattggggatcctatgcattgggatatgggtgctggctttcgccgaacactccattggttacggacgacttgtgctacgagctgcatcatcgggggtttttcttctgttcgggttttgttagatcagatggatctatcgatatatgcatattgcatctatatacaccctcaatccatattaaaaaatcgcgagttcactctctttaacgagcgtcttttaacggaagtcaagtcatttgtggctacggaatgactccggagctaagatacaaagggaaccggaaattggggtaactcgccatcgagatgaaaggaaaataataataatgataataataataagtcaacaataagactcggcccctaaagccgctccgggtctagtagaacaatacgggaatacgagggtatattctatgcatacatatcattcttatgtctgcagagtacactccgtacaaacccaactcggccgaaagaaaaaaaaaggaaaaaagaaaagtaaagtaaaggccagtcagtaattgtaccaaatcaacagaatcggctttccaaaatatcgatgagccacacccccactggtttgcgcttctgtggactcttcagatccaatccgaggggctaccgccggtggctggcccttgggcatgtgcgtttggggggcgacttacttttccgatcgaaatatgggagaatcgggtaggagtccactttagtttacatgtatttttgatcgtattcttggacaagaatcactccaaatttacaacattagtgagatggtctgcactacggcatagtgtggaataaatccggaaagatggttctacacgacactgtaatctctcaaaatggacaactcttggcgaagtgatcatatgctagggtttccacaagtagatggctaaggattactccgtcgagactatcgttatatgtaagatcccgttatagccaatctcaaagccaaatcccttcttggaacaatcgcggatctactccggaaaccctatcgagagacttaatttacatattagccctattagatgagatttaattattaacaatagtgtggcgtagctgagactgggctttcagccgccttcttaggcttttaaccttctcataggcgttttagttggctttttagttcgatgctttctccgctagccttgccaccagcggaatcccctggtcttccgcggcctatgagtggcttcttttagaaaattctccgacatcacctttttttcggatcttgcgatcggcacggagactctggttttgcttttgagtttagttacaagtcgagtgtattatccctcgttgcagcctgactttaatttcccatttttgtaaaataaaattgataggaaaattgtaggaagccgactcgagattggcacatgaggagtatgagcctctagatgagagcctaatggttgccaccagttgtccatcgaggaaggtaagatccctgtgtttccgcccctttcctggggagatcctgggaccagccaggtctgaagaaaaagaagagactattagtaacatttacgggtgattttcgataaatatgtacatattttgaccaagaaaccgtctgaaatgtactctccggcaaactcaatccaatcaaggtttcagaatatggcaggcaaatttgggtaggataggcatgtatataggaactatcataacagggaggcaatcggttcctatttacagtattagaagaatatatattcaggccagcagccagctttggtcgtgagatttgtcggatatcattaagcagtgaaagcagaaatgaagccaagagagaacccgaagagtttctgctcaaaacgccatcgctgaaatgctgcgaaagtaaaaatgaaacaaaacgattgccgcccaaaagatgcacggagaaatacacgggatgtcacggggaatattgtcatcaaatcccaaaaagagaaagcgaaagggtatctaagggttcgcaagtgcggtgaggtatagaggcaaaaacaaagaggccaatagaacaagtcaagccgccaagcaatggtcatgaatcatcaattctgttggagaacttctgcctcgagccagaattgcgggaggaattcgaattgacacgcgagctagagctagaattagatttaggccttggaagatcaccagcaagcgagttttggtgaatctcctccggaagcaggagatccggtaggtggtctggattcgatgccagactgcgtggacgtgaaagcacaccacccagagaaggattatccttttcgcgatgcatggtgtcgactggagcacgacttcggcggcgatatcggcggagatactcgtttgaaacagggtcgacttgctttttaacggctgctacagtgttaaggtagacggggaagatggcgccggcggagaagagcgcgactataacgcagaaagaatatgattcgtcgtgtgcgaggtatgccgcgtactcggcaaacgggaaaaaggtgccgccgctgactgccattgtcaggaaggcagcggctgttttcgtatgctgggctgtgccgcggagggagatggcgaagataatgctgaacgcaccgctctcgaagaggtagagcagcattgccataacgattgctgctgagccgtttgttttcatgcaaagaatggagcagacgatcatgccgatgtagctgaccatcagaacccagcgtggtttgaggaaccactgcgcaaacgcggccaagaaacggcccacggcgaaaacgctgtgtccgatagttaggaaatcaaatggtgacgaatctggacgagcggcaagaacgaaacgccggagagctgtcgcgaagacttcttgcccagccacgtagaagaattgagaccagattccgaggccaagagtcagccaaacgactgggataccgaccactttggtcatgttgtcttctcgacgtcgatttgcgagctcttccaaatcttcatctgacgcttcgggaattggtagataataaaacgccactgccaagagcacatcgaagagagcaatgccaaggtatgcccattgtacatcaaccagagatgcgacatcctgcacatccttgaagaggacccgtttcgccaggagcggtgacaagacacttccaactgcttgcacaccctgtgaaatattgagtctgatctcggaattctcgagtggtccgcatagcgctatgaacggatttgccgcagtctccaaaaccgctagaccaaacccgacaatgaaatttgacaaaatgaacgcgggcgtcgaccttaggacagcagaaggccaaaatatgagggttccacaggcataaatgcaaagtccagttatgaacgtggacttgaagccccatattttcaagacgggccggccaaccagcagagggccgaccacgtatccgccgaagtacgcgccatgaagacccaaggaataccatggatccaagtggacgatactcttgaattgagaattcagtatgtcaagcaagccatatgcaaagccccaaaggaagaatagcagagtggtcaatgcaattggcgcaatcgactctctgttgtttaactttaacatactttccgggtttttcatgttgacaaaatcgaagaacgtgatatccggtgcataagatgcgctagtatgagttcctccctctgtatcggcgggtgctgtttctgggtgacctaggaaatccaagataccaatgggctccgattcccgggagctaggccgaccagcagagacaccaccaacttggttcggtagtcccttatctccctcgttgctcgatggcaacggcaatggcgatgaagatcccggcgagcccgagactgcagccggaggtggcactgcaacctgactttcccctggcacgcctgcagagagtccatgaggcgaaggagttgatacatcatcattcgtgtctctaatcaacttcgggacaagacgagtgacgagaggtttgagacttggaacacaaccgcaaattatggaaagattgacttcgacgacagaccacatgaaagatagcgatgcgtaccctgcgaaaaccccgctgttagctcaattgacacatcaatttcaaacctgggagaagaacgagccgtacaactaaaatccacccctccgatgttttgaatatgaattgaattgacttccagcgagcgagaaatggcagcctgttgcaaaaaggcaattcgaaccacatcaaccacggccacaaagaaaccaaacgagaaagtgatcaccaatatgatcttttgcttgaaaggtaggcgcattgttgtcaaaagcggcatcggaagtaacaggatagcaatgtcggtaataatattcaccggcgacgaggagaggtacagggtgacaatgtcggtgcaattcgcatccgccgggaggtgggaaaggaatactgcgccgataggacgacattggaaaacattgaccaatgttaatgcgaagcccgctgcgttcactacaaacagagtgacatagtttgcccatcggaaaaccttctggttgcgcgtcatagtcaggtagaagacaagtatcgaggtcttgacggccattaacgccggattctaattggttatcagcatgtcattgtttttattgccctgcggagtaacaaagggagtaacaaagggcagttgtaactcacatataggaccgtgaatgcataattagccttattaaaagcgagtccatcttcaggcttgatatcatcggaatgaaggccaagaccattctgaaccgcatagaatagcgagaaggaaaagccaaaatcaattaactgcagacttggttagcctccgagctctagcacgaggttccagtcatcgccaatagagcgagtccgttctcgttacatccccgggtacatgcagggatcaagccgagggatcctacccatgcgaccaacatcaaccagtcgtgtaacccaatctttctgaccacaaatattcgcgaaatgaagcgaagggcgacgaagatagaggcgatgcagaaaaaggtgatcgaaacacccagcgtagcttgttgacgaccttccatgacgaatttgaccgatggactgtcccagcggacagtccgattctaacgaccccaatctccagtgtggcgcagaatattgcacacgattgtattcttcggattctagcgtaaagtcgcgatcgtaggcgggctgaaatggcgcgtgtgcggaggcgtcatcgtcttctttcccgacggagtccgaatccgtgtatgaaggaccgggagcgaaatgaggcagaatagacagggattagaatatttggagtagtcgaggtagaagaggaaacaaaaagagaagaaaaagaagttgaagatgtcagaaaagtaatgtggggagagagaaaatcaggacccttctaccccggctttggcccgccaatcaccttggacttgtcttcttctacttcacccctttgaagactcgacaggtctaggctatcatgctacacaaacacacaaatacacaaatacacagctacacagctacacagctacacaaatactattcctatccagggattgtacacaatggaagatcgcccgcatatgtcgcacccaatgaacatcctggacaaaagcgagcttcccgtgagatctatggaatgtgacacaacactgtgatggtttttgttgtttttgcgtgcagggcacctgtacgagcactttgtcaggggccgtgttagtccgcgcctatgttgtatataggcacttcgctcatggtccctgcccttccatcttcccgagtcctaaagtttcacccattggaatgcacgtggcagttactatattgaatcgacctggatgctgcaaggctgtactgaggagtgaggaacttccgtatcagaccggcggttctgggatatttgcgatcgacaagtgatctactcgccaatctttagtgtgatgtgtcacgccaaaagctgcagccctcttacctcaaactccgtacaccaaatcagcatatgtgagcatgatattgatcttctaccccagatacattctggacaaccgatcgttctcttatgcccgcatgacagtcttcgcaccgcaattcctccaggcaccgagcttggcatgtacaacggtcgacagggtggaccgattcatccatgatttctctgtcactggatgagcttcgtggtgctatatatacctacatttaagcaagcttctgattgttcacctatattccgccactacagtttcgtttgaacgccgcgatgactatttttcttaatgtcataagttcccgagtttatgcgaacacgccaagaggaaaccaacggctacctatgatcgtcagcccctgagatcagcggcttcgcaacgttacaaggaactacttgctagctccttggctgccttcaaattctcattctagtatgtaattgcgagaacccctctcggtatatcggatgctattattctccgcttctgtgctttgtgcttaatgaataaatgtgctcaccacaacgtggattccgggaatactggatactacttgactgtttatcacatggtaaaaggtgtcccaaggctatgtcggaaccgaacgagatcttcgttttgtgggtaggtagttgcatgcctttagttcaattcttctaagcgagctgtaggaccaccttctatttgttgaagtacgaaagggtctgcccgtctcctcttggccggtgatatataagatgccgactgccctggagtttgcatcaacgctgggaaggtacagagtgccctgactgcttccaaggttgtccttgtcaaaccagcggcttcgtctagttaatcctcatcgagatgagactcaacacgttgctactggctttcgggctttcggcatccctccggggtgtacaagccgagacagaagtcgagaactccatcgcttccatctgggacgacttcaaaaatgcagtgaactgcggtgcttgccaggtatgtctgtgctcggcacctccatcacttgtaaagctctttagctgactctacgcaattctacaggttctcctcggtagcattaaggttaccgcaggactcggtgaggatttcatggtcgatgtgttcaccgggttgtgcaaaatcagcggggtatgttgacagttttcgggagctactggctcaattccattaatcacaagcatacaggtcgaggacccagatgtctgcgccggaatcatcgagaaagaaggccccgcattgcatgatgctttcaatgctttacaacttaactctgatacttccaagacactgtgcgctagtttggtcgggctctgcaaataccccgaagttcatacttacagtctgacattcccttcacctaagccaaagactgtgagacctccacctagcggaaagacgccgctgaaagtcgtccatttcagcgatacacatgtggacctcctttacgagcctggatctaactacaagtgctccaagcccatctgttgcagatcttggtcagatgaagatgcacctgagaatacagaacacccatgtggaccatttggaaacacaaagtgtgacccaccacaaatacttcaggagagcttgcatgctgctatcgcagacattaagccagagttctccatttacactggagatgtggtggctcacgatatctggttggtcgacaaggccgaagctctgaaagggctaaatgccacgtacagcgcaatggaaaaagatatcggcacagtgtacgctgccataggaaaccatgacaccgcaccactcaacctcttccctgcagatgcttcccatgaagccgatcctcaatgggcctacgatacacttgcggaagattggtatgcactcacgggcattccttccgtcaagtctgcggatcaatttgcctcgtactcagccgtccaccccaacagcaatctgcgcattatttcatacaacagcatcttctactacatatacaacttctatatgtaccaggaaccaatggagaaagacccacgcggacaatttgaatgactcatccaggaattgcaggccgccgaggacgcaggccaacgcgcatggctgatcgctcacatcccatccggtgtacctgatcacttccgcgaccattcggagtactttgaccagattgtgcagcgctacgacgccaccatttcaggattattctatggccatacgcacagagatgggttccagatcgcatactccgactacaacaaccgtgagtggaacacggccactgcaatgggttatgtcgctccagcggtgacgccaacagaaggctcgccctctttccgtgtctacgaggttgacccagtcactttcggcgtcctggattacacccagtacatcgccaatatcagcgacccatccttccagacaaagccagaatgggtaccttattactctgccaaagcagactacggatccaagatctctcctccgctcacagatcccaaagctgagattagtccggctttctggcacaacgtcactgtcgccatggaacgtgatccgaccgttttccaagattactgggcgagacgttctcgtggattcgaagtcgagagttgcgatgatgactgcatgaagaatgagatctgccttcttcgcgccgctaatgcacagtataactgtgataagccgaaggctttcgacttttctaagcgtgatgggcaggagggtgatatcttgctggaaaaagagcctcatattgactgcgatcatgctggaatggcgacgctggtctcgaagatggcgcatcgggctaaacttgagcggagaagggagcttgagggcgatgatgcgtgatcatctggtagttgaaatatctacttctggacagtaataactaccaaagctaattttgataatttatgccatgcaaatgccctttcattgacaaacataatagctacgccggatatcaaaaaaagacccccctcccaaaaggatatgcgcccgagcccgggacacccgggcagttgatgtcagataacctcgtacttacatacatgagcaagaaattgagtatacatctttatatatacaccaggagcctggccaaaatagattgaggatattaatatcaacaatagctgccatgaagtataatattggtacaaatacggttgccagaaccagaaatcaagcagtaaaggttgactcaggatctacgggaagaagtccctggcgatctatcatcgcaacaaggtctccatccatcatgaactccccaagttccataccaaatggtgagagactaaagtcatcccctgtaaggcctgttcgactaccatgaagagcgggaagcgttgtagtcgaagcatcgaagctcgattctaataaacagtattgttagcgcaatcacaaatataaagaagatggaaaagagactaaccaggatcgtccaagaccttgctgaattgttccaagtaataccgacatcgatcgactaaccggtttccttcatcgagcctggaaagcgccgctactgcacgactgggatattgtctggctttgcttgctcggtctgtcatcggagttcctgttaggcttgcatcacggtagacccaaaccactccgatgaggaccagtgccgcattgaaagctcaaaagctatcagcatataaacctccagagtgaggaattcggagcatactatagtataaggagaaccaccaagctcccaaaaggctgtgtttccatccaggttctgataccatgcggtgtacgatatcaatgatctccatcgcggagtccgcgcatatctgcaagctgttcataccaatctgttgcaacaatctcatatcctggggatcgcgatcaggggacctgcttgcagtgataaatttgaccaataccgggcggtggagcaagactcgaagattaagatatctcaaggttaggatgacttgaaacttcaacgagtggtattgagaattggtcgacgtctggtcacgaggcagattctcaataccagctgacgatataagatgcaatggatgggcaagtgcccgttcccaggagaacaaatgctgttccaagctgaagatgtgggccacggtttcgctgactggcaatggatcatcgcagccgatgttttggccatagaggagctctatgacgctccagagctgcttatagagtccactggtatatgtcagaaactgggactacgggtgtaaagctcaaccacttacattgtcgagttgaagaacacaacactcaaggccaccgtctcgtcgtccacgaaccctgctggagtttcaaaatcccgtttcgtgggcagctcgagcttgacgtagccatctggaatggctgcaggtctgccgaaggtcatgctcagagttctatattgtcagcatatgtttgacgtgtggagctttagccacttaccggtctaaaaccacacaaccgtaccaagtccgctttcgcatttcctgttcaagaggagaaaatactttggacgcatgccgtgaatgtaatccaagctgaagagcggctttgacggctaatccatggacagtccatgcttgaattgacttttgcgtgccttggagatattggcccatcagaagcaaatattgaactagggacacatagtcaggacaatattctcaaagaaggcaagagttgggagctacctacccacttctagggttgtccctcgcaagatttcactcccacacaaaccaaggccacgctgataaaagacatccgattctttaatccgagcatctgcgctcgcacttccaggaattgcagtgacagtagccatagccagcaccatgttcaacagaccaagccaagtccttcgtaccccattgaagttctcccgtgtcatctggtgatatgtgtccaggaagacgggtgggtatatgtaaggaaatagcaagcctgtgttagagaaatagcgtttgatgagctccaaagtatttgcctgcggtggtaaagcaaacatgttcacctgcatgcgccggtcttgacccctctggggtggtgatgatggtcttgatgcattcacgaagccaccctcggcggcgccaggtgaagggaaataccccggttggacaatagcgctcgacaaatgtcgaagaaatgcaatattcgaagaaggacctgataaaagtttagcagtctagaacccccttatcaagcagatacacttaccaaagaacccggaatcctcctcatcagcaaaaatcaccgcacccataccatcgactgaatcctccgtcccagtcaaatcaggcatcggtgcagcgattctagtctcagcctcactctccccgacattccgaccagaaatagcagactccctttctttgtcccttcgaggaccacaatcaactcttttcgccaacccatccaaatcacccctcacagccccaaaggactcttcgagcctctttaccctatcctcaagcccatgcagatagtccttctgcacgacaacattagcggccgttggtggcggggtgtaaacacacgcaaaccccaaatcctgacataacgagcagctgggccgcttgccgtcacaccgggatttgcgggttcgacatgcatcacaagcgatagctacacggcgccttttggagggccgcccgttagatgtttcgttatccggtgaagttgatgccatttcatactagtggtgtcatacgattgggggttgtcgggacgtggttgtttctggggaagtgtcggccgggggtagggcggatagctacccggtgtttccggggtgaggatatcatccagttatggtggacagcagtcattatcttgactttttcagatatattttcaggtgtatgtctcttctatttggtcatttcttgcgataaatgaatcttggtgtttccagacttcggttcagtggagatatttgaaaagcgcccgagcatggaggtaatgctctgttcatgaatgtactattatatgaagcaaccttgtatatatacaccatttaatccaacagatatctacccaagacatgataaactcgttaaatcgtaaagcgggcttgccgcgcccagaaaatcaccattggaaacaccgggacccaaaaatactacagataaaacaatcaactaccttcatgggtagataccactatctccggggtagactgaagccccggcgatgaagttttggggctgacctcggaaatagatggtgctctacttcgcgagctcggcgttatatcccacggacctaatgttggcctttccgcaggcgctgacccaggaggacactgcaaggttaatgtcccagatattccttgtgtcgggagtgaattcgagtgattctgacgggatcttggccgagaggcagctggggtaggcagtgaacgacgtgttggactccggggcctccttgagctgccttcaccattatccacggagtccctcctgcttatgaaacttccaggccttgatcggttatcaggtgtagatgaccttttatatttatcttgtagagttcggaggtttccatttttgtattcttcacctggggtctcgggataagtcgttttcgcttcgggtttgaaccccgttttttcgatttgtttgtgggctttggcggtcataatagcacttactgcgtttaagaactgggcaacccttcgccttcctagatcgtgctggagttgggtggtagtggtctggttggtagtagggcggcgtatggttgtcatttcgatatcgggttcctgcctctcggcacttgttctagagcctcgtgcagaactgcttccggtctccgaagcagaacagtcacagtttgggcattttccgacaatagtctcttcttgctgcccatcttcccttccggcggcttccatatccgcagagaggagcagatatagtgaccccaatacagcgagtgccgtaccgacaattggcgcccattgacctaaggaatcatctgttagtgaacgttcgccatttgcattgtcgatcgcaaaagccaggcacggtaaaccatttactcaccaatgctttgcataggctctgtttggtgcctcatttgcctactccaaaagttcatttcgcctttcgcgaggattgccagcactgctgcagcaaacaccggtatctcaatgagagctaaccatttgcttatcctgtcggtaatcctggtcatatggttgatcgtagctccgttggttcccacaatcggttcatctggctcctgcttaggctttccattcgagaacttctcccagttatcgtccaagattttgatccacatggataccaacgacaggatggcagggatgcagcatgcggccgcaacgagcgtagtggcattgaacgacagctcacgaggcactgggatcacgtagatattgtcggctgctcctagtcgcaatggtgagactggcccattatctggggtacaggcaatgccacagttggagccatatggaaaatcacccgttaagtcccagaggatgcttgcctcgtcgtcaactgggcaagtagtgggtttgagacgcatgaattccacgatcaagctcactagcccagccaggagaaggactgtccacaaaaagatgatatcacggccgggattgttgaagtaagtccgggacagcctgacggtggctggggcggttaagataccgattgcgcaaagctggaatgccccgtagatatccatgtcgacagcgcctatagaatattagattcggtggtcattccgatgggtcacgccaggtaagaaacatcgacccgttgcaaaagtttcgctcgactcaccgtcgacatggaccgcagcaagaacaattccatgaagagccgcgatagcgggaaagagtaacacagcggctagacaagcgttccgaatccattctactttgcgggcaactacacaggctgcaattaaaacatagtatctggcgtgagtgtcagcatatcatgataaccctgccggtctctttgtaaaggaaacatacaggactcgggtccccgggccatattgaccggaaaccggccatgcgcaaacaacctcgtgagatagggcgcttgcagctgttgtcacgttagggggcgatgcagtagcacgatgcacaagagcattccccaggaagggggtgacaaggggaattgctggcattgcatgttatccgtctccggcgacggtaactttaggataaagcagcaaaaaaggcatatattaatgtgttgttgtgttgttctctaatcctgacagtgacttagtgaggctcgacgtgaaatcataagaaacaaagaaagaagtaaagcaaggagcttctgggccgtcttatccacgaagcgctactccgcatattgaccttggtcaacaaagcgaagagcgcatgcagcccgggtgcgagttgtttcgtcagcaacagcctcatctcggattttagagcctcggcctagctaggattggatagctctggcgggaaacctctatcgctaaggccaaagcctcggaacgacaagtgccccgtgatgttgatttgggcgggcgcagcaacccgggcgtgaatacgagatggggcaacctcagctcccgccgattggcaagttcagcatgtcatgcatattgcgcagtgggctgtgttgggcgattcgtaggtgtttccaagaaacatctatgttgtaacgattcaactcaaagtcacaagaatctcaaaaggctgggacttgatattggccgaaccatgggtccaacatattaaagccaacattaaagtccgcgggtgacgatcaacttcccaaagtggaagagtgcggggttctcaaaatgtggccaatctcgaagagtctttgactccttttattggacgttacctacgtacttgccaacagctaacaactaacgagaatgtcacttgtgtcccgtgtcttactttgatttctggtctttttgattgccctttctattgaggctcagacgtcgggactttaagcgaaaatttctctcatcctggttctcgctgtcgcaacgttgcgttagcgtcgaaggaactgattacttcgcctggattctagctcaactttaatagagcacactctccacagaacccacttcgacacggagatattccacagcctcacagggcttgcttaacgcttgcttgacattcattagcagcttgggttcccacctctcgccctcccctggtctatgtcaaccgtcataaatcatttgaccttgccgctgtgattatgaggggcagtccactcgatttccccacgtcttgataatttcacttcaagcataacagagaacaacgcgcaagtgaaatttctctggatctttgacaggaagcaactaggatcgttgctagagatctcttgcacaacagaaatgcatttgcaataaaaacaagagtgggatcttcatatgcacatttctcttgttccgcattccggtattttgtcatacccgacagtggctgaagcacgagagaggctgacttggtgcctgacggcaaaagctacccagtgcatgtccttgaacctcagagaaacagatattcaaaatgtacgacgaacttgacacatcgaaaatcaaaagttggcgatcaattatcaccttgatcatttttgttataactagtaagtgtggctgtgcctagaatgtgagattgagacttacttttggcttctttgcgcagataccattgtccttttcccattccatatccctctatacctacctcgatggctcaccaacgggtttctggacatcttgagtgccatgcgcataataccccaccggactcgttctcgttccgatgacaagcaacccatttttgtgaagtttcgctttccattgaactttgtcacggcgcctttaatagcggatctgttccttctcgctattttggctattggccgaaaagaggtacatgatggaatagtcggggccgacaacattaatcccattgatatcatggtcttcttcctcacactcgcctatattgccatctcgattgatgcctcgggccttatcagatatctggccttcagggttctccaaaaggcaggtaaggtcgggcaccgactgttcttttacctgtttgtgttcttcttcgggttaggtagtttcatcggaaacgacccgatcattttgtccggtacagctttcctcgcatacatgacccgtgtatcaagcaatatcgtccaccccagagcctggatccacagccagtttgctgtagcaaatattgcctccgcgattcttgtctcctccaaccctaccaacctggtccttgcaggcgccttcaagatcaagttcattgtctacacagccaatatgatcgttcctgtagttgtgacggcaatcgttcttttcccgttcctgctatatatcattttcgcggacgaatccctcatccctctatccatcacaatgcatgagctttctgaggaccaaaagaataaaccacccgtgaaccccaacattcctcatgccagaggaacctccgaagagaaagaggaagcggatgatctggagggaaagcagctctcgctagaagagatcatgaacccgttcttagataagaagggtgcatctttcgggggaattattatggccgctacgcttatcaccctcctggcaattaatgcatcaggcaaagagaatcccgttttctgggttacattgcctgctgcttttgttatgttctgctgggatctcgcatttggttggctccatcgccacgacacccgtgagattgccgcgaagggtcgacaggaggttgaagaggcacagacagagcgagaaatgcgcagacaagaggagcagcaaccccggccaaacattacgggtccggatacctcggggtcggaccagcctgggcaatacgatgctttgggcatacgccaccacagcgagcatgcggatggcaatacctcgcttaagagcaccgatagtgatgtcgcctcaaagaaccctggcccagagtgcggaactccatggtcagcttctgtcctcgtcgataaggaaaagttcccagacctacagacaggcggcgttgcgattgacagtaaacaactagctcgcgcaacgactcccgaggcgctggactcgagacaaaccaccgacacaacgatcgatgaggagaagccaggatacccatattttcaggccaacggcccacgcacgttggtgtcgctcgctgctgatctctatcgctggtcacaggagacattccccaccgtgacggtcgtagtatcccacatgcctttcgcactggtacccttcgctttcacgatgtttatcctggtgcaggcgcttgtcaccaaggggtgggttccggtttttgcgtacggatggaaccactgggtggaaaagaccggggtaataggcagtatcggtggaatgggattcctatctgtgattctgtgcaatgtgagtattcgagcaatgggctgaccacttcttctgtctgaatttgaaccgctaactcgttatattctgataaccagtttgctggcacgaatataggcaccacgattctcctctcgcgcgttatacaagcatggcagaagatccacgaagccaacggaactcccatcagcgatcgcacatggtgggccactgtgtacaccatggcacttggagtcaattatggcgcatttagcactgcgtttagtgcttcgctggctggcatgctgtggcgggatatcttggcgagaaagcacatccgtgttggcagcctggaatttgcccgtgtgaaccttcccatcattgctatctctatggtggttgggtgtacagttctcgttggagaagtgtatcttgtcagaagtgatgagccctacgtgccatcttgatgtgtggattgcaggaggctgttgtttagatgttttatagattatgatgctctcgatgcttgtttcgtgtggccctctgtcacggaacgggcagacgatcttacgaagccaatgaagaccgctttacagtttttcagaactgtgtccatgggagagtatcttcgacaagtgttgttctcattgtgggatttccacttattccaggggttgtgttacgttctatcacttgatcgaccttcccacgatactctaaccacacatgcaaccaagtgggcttcaaggcttcactcatccacaagggactcaacgtccatatcttccgagcgatagaagcccaatgcatcaatcatgggcttgtcgtcaaaccgatatagataaaccggttcatcagcatccgcaaagtgctgatatctgtaccacgccggaacacagaaggtatcaccctgctcccagatatattccttatcaccgatagtggagcgtcctttgccggtgatgacatgatagacagcggacgtagtctcgcgccgggaaggcgaagccttagatgccgaaattcgctcagcacatcctccaaggacgcgactcactatgaaaatcattagccatcttcccacctaccgaatgaaagtataaaagagggaacgcgtaccttcgcgcccgtcttccttcaagtatctcttagtagcccaatccccagcaaccccatccaactgtgccttcatggtaacccacgggaaaactaatggcgaagtggtactatcaacattctccgcgggatagcggggcttatcgaagtgctctacaaagtgcacagggtagtgtctgaaattgggtaaatccagcccatccaaccacaccataggcccagagccatctttgccgtggtcatggtagttccaggtcggggtgaggatgacgtctccgcgctgcatcgtaatgcgcctgccgtggacagcagtaaaaccgccctggccttcgatgatgaagcgcatggcaaaggccgtgtgtcgatgagcgcgtgcagtctcgttgggcatcacgagctgcagaccagcgtagagggtgtccgtagtgaaaggggcatcttggataggatgtcagaagtagttatacgcagtatatgaaagtaaaactctatgaggcaatgtgaaaataaaagataactttgtacatacctcgagctgggttggttagcatcagcacccggcgctcagcctgagatgctgggacgagatttccagcgcgctctaagttaggcctgatggtgctgtacttccagacatttgggactgttgtcgggtttggcgctggggggttcagacgagccatctgcttccacagaggaagggtcttgcttgcttcgaggtcaatgagaagctgttcctctgtgtcgaggacactttccacttgagttgaagtcattgttggggtctttgtagtaatgagaaatatctttagattgtattgccttcattctatggagaaatgatcgctaagatatatcttgaccactttcgtaagatcgtcctctcttgctaaggtccggggcaagaccgggtagccttccccggtgcaatccctgtcgaggagtcataaaggcggtgatccgatgcgctgttgacgaggtccaattatttgactttgaaacaaagaaagtgacaataagcaagatggtgtccaatggtcaggccaatggctatgtctctcaggcatccttgaaggtgggtttctcatcccgaaacggcaatgtcagcgtctcaaatattgatgaacacatgatagaccccaacataccccagcaactgcctcgaattcttaaatgatccattagcagttgagaagaccatccctgcaaagggccccctaaaaattatcgtcgtgggtgccggactcggcggactagcaacagccattgcgctcgcaagttccggccacactgtgactgtgtacgagcaagcacagaagctcggagaagtactggctatcctctattggtgttaacaaaagctgatcgcgtaccacaggttggcgccggtatccaaatcccatccaactcaactcgcctcctgagcagactcggtctggacccgtatctggaagaatatgtgaccgagcccgagtccatttctttccgacgctggcaatcaggagatgtcataggcctcacacggctcatcccaagcttccgagaacagttcggcgcaccatactatgtgatccaccgcgcaaacttccattctgcgctgcatagacgcgccctggatctgggtgttacggtaaaggttgcttcgaggattgttggatatgatatcgagggaccaagcattgttcttgcgaatggggaaactgcttcagctgatttgatcgttgccgcagatggtgtgggtctccttgttcaagatatatatgaccggttctgatactttgtaggtgttaagtcagttgctcgtggaactctcgatgagagcgacaagcctgcatttgagaagactgggtttgcagcttaccgggctaccgtggatgtggagcgcatcaaggaagacccggaggtttcctggctgttggaaaagccggctctcaatatctggttagcacaagtatgcaaggatgttcgaaattagactgaccattttgctaggattggtgatcagcggcacgtaatgacatacaccattggagccggcaagtctttcaatatggttctctcgcatccagatgacagtgatcctgcaacctgggatcagaagaataccctcagtgatatgagacgcgagttccaaggatgggatacccggtataagtctatggatcttcctggcatgtgtccttgttaataagtttacaggcttgagaagattattggactcatcgagaaaaccatcaaatggccactgatcagtggagtcccgctatctcgctgggtaaatggcaaggttctaatactaggagatgcagcacatgcaatgctgccttacatgtcgcagggtaagtgcagaatcacaattcacgttaatagtcactaaaactgcacaaggtgcggcaatggccgttgaagacggcgcagcactagcacgaactctgtccaaaatcgaggataccacagatatccccaaagcgttgcgtatattcgagcaggtccgcattgaacgagctggaatgatgcaggaggcgagtcttctgaatggaaagctatggcatttcgccgatgggccgctgcaggaagcccgtgatggagctatgaagcccgaaactatgggtttgcctttcagtcacagtcctaaccagtggagtgacccggcgactcagatatggtgctatggatatgatgccgagcaagagattgatcgagcttggacgaagttggaattgtagagttttcaaggctgtttccaaagggaatatcctacttcctcttgaaggactataactatgtacctcatatttgatgtatccttcgttcccctgtctatttgttctatctataaagaagtacaccggtaccaggtctctagtgccttcccctttgcttctgttcatcagtatcggtctagacactatagacatccgatccccggaagaataccttatggttttccgaaggaccataataataatcataaggtttcgtcatttcagttaccccaatttccccatctcacatttggtcagctacgagaaccccatcccggatgtacacccgacaaacccggtatacccgatctttccccgtcacaacgacagtaaagagccatataacgccccaaccctcgctatgaattcccttctattagccaatcccaattcaaggaatcgaatatcaagaaccaaaaagaaatccgaagccatgtctctcccgtggaaacgcctaatccgcttcatcgctacagacggccgcaccctgcgcggcgagccaatcctccccaccccaacaacagatctgggctttataaccgagtccgacaacctgcaagcacgagtgatcgaaggcgacgacatctacgacacgacgggcaaaacacgcgtcactgatgagatcgtctctgtgaagaccatcctaggcccattggcgcaggcagatgttcctattctgcgttgtgtcggattgaactatgcgaaacatggtaaaatttcccacccttagtggaacaaactctctccgaggacagttacttatacatatcgaccgtgtcaacagtcaaagaagccggccgcactccacccccattcccatttatattcttcaagccaaacaccacaatccacgaccacggcgcaccagtagtaatcccacagatcgcacaggactcacaggcagattatgaaggcgagctcgtaagacaagtcccctgtttctaccctgtcctggggtaatatcagtatactaacaaacgcccatagtgtcttgtaatcagccgcgacgccaagaacgtctccacggaggattcgctttcatacgtagcagcctacacagtcggcaacgatatttccgcgcgcaagctgcagcgcgacccggcgctcgcgggacgtgttccgcaatggggattctcaaagggctttgatacctttgcgccgctgggaccgtgtcttgttgctgcgagcgatatctctgatcctagtaagcttctgctgaagacgatcattgatggggaggttaggcaggaggagtatgttgcggatcttttgttcgattgtgcgtatctagtgtcgtatctttcgcagggtacgacgttgcagaaggggagtgttattatgacggggacgcctggtggtgagtttcatctctttcgtggttttctttggttggattatttgagctgacttgtcttaggtgtcggcgctggtctctcgccgcccaagtaccttgtccctgggacgcagatggatgtggttattgatggtattgggacgctgaggaacggcgtggtgttcgattgagctgaatcatatgttgatcgttgatggtgtttagggctcgagtatagacaggcagacagagatcgccagagcacttcttaattgatccaaaattcaagacaataccgtaagagaacgctatacagcatagcctgtcttggcccgcaatagagcgtcctaaagtagaaatgaggcgcagcggtcttagcattgaccagtacggagcagtcacagtcactagccttgcgttgctgtggttcattcccccttttggggtcgacttgggtctcaaaagtggaaaggggcgaggctactccggacagaatactcgtataaacaaagagccctcgaaataatacctggatactactacgaatactcgaggagagactattggagcaaacacgagtcaaacgaatcgagtttcattcaatgatccgcctcctgcaatatgccttatgtttttgtttgtttttcgtttcgtgagcatgatcatcgtaatcgtcattggcctgtcgcatttgcatgttcgagatctcgtaagagaaaccgtccatgacttgccagcatgcgcgcagggatcgtaagcttatgtgttatggccgaatggggtccatcatagggtggtattgcacaagaagactgcgaagagaagattctatgaacatgaaaaatgggtaaaatgtgaatgctgtccgctagggacacgcgaaatggtaaaaagatccagggtcaagggagtgaacgaaaagtaaaataagggcccggtctctctgagagataaatgattgcgctctcggagagaccgggaaagaaggtcgaaagatcacagtaaagtgaaaaaaaggtgaaaaaaaagagggaaggaccgtcaaggccatatccacttgcgcaatctaccagagatgtgtccattgttcgtattcataatcgtggccatcaacaccaacgcgcggtcgacgcgacatttagtggatgaaccacttggcaccagaggcacggcccttgtccatcggggcaagctcaccgaagaagtgacgagacagatcgacggagccgttgtcgcagcccatgcacttgtcaaccacaataccggtggcagtctggccgttgtatgtgacggtgacggtcttgccgcagtcactatcggtcatgataccgtggggcagggcgagaacgttctcaacggtaccatcattggtagtgccgcaggagctggggttggtggaggtagtggcagtgtcgtagaaggtgatctcgccggtgcaagggacgccctcggagcagacaccggtgcgggcgctcttggtagtggcctcggtgttggcagtctcggtattgacagcaggggtggcagcgggagcagcaggggcagcggcagaagaggtctcggcctctacgacgggagctggagcgggagcgggggcggaatagggctcggcctccacggtgggagcagcgggagcggcagcggtggaggaggtggtcggcgcagccttctcctcaacgataggaacagcggcagcggtagtggtggaggaggtggtgggcgcaaccttctcctgctcctggacagaggcttcaacagcaggagcaggggtagtggtagggacagcgttggcgaccatagggaccacagtagcggtgttagtggcctgggggtagacggtggtggtgacatcgacggtggtccagacgatgtcagtcacggtctcccaaacgacggcgcgtttggcaacgggggccgagtagccagtcatggcgaagaaagcgccagcaagggcgagagtcttggtgataggagccattgcgaatgaatcggaaagatgactcgagagagagtgtgttggatgttgtttaaaggattgatcaactgcacagcaggaagattggattgagcactcgaaaggaatgtgagtgagcaagaaggaaggaaggaatggactgagagagaagaaagagaatgggggaaagggtctcgactttataaaataccgaaggtaaggcacaaaagaagaaaaggacccacttcgatggttactaggccccacttatcggccaaacccatggttcaaatcaagccacgatccaaactataagcagctcactccctttcattccttacaccggactacggagtatactgtactaagtcccgtatattagaatagataaacgggggacggagtacgggaagatcacaatcacatcaagccggatgccccggtagattctcattggaacagaaaaaaaaaagcccaggggcttgtgcgccacacaggccaattttctcctcgccctaatctcgtctggggatagagcgacggctgcttcagccgatcctacgactctactgcctactggggtctgacgacccacatattttgcttcgggtacctggcaagttgacctatcagagacggcaaattatttcattcttttccacgatttctttcttttgaaccatatccgctctttttcatatcgagatctcagcgtaccttgctcgttagtcgccttgcaaatgacgtgtgtcgcggtgtatacagtcgcaatgcaccccaggggaggactggtcagattactgcagtctgccttttcagtcttacgtgtgtgtgtgtgtgtgtgtgtattgtatcgggccccgggatcaataccgatgcgattggacaatgcatgagacaaagatgacattccagccaatccagctgggatcggggcatattttacttgtactccgcactccgtgtactattattatacaggtaatttaattctctccactgtcaacggtctggacttggactatgttttcaaaccgttttttggggttttgggtttttagtgggagaatagcgccgatctcttcgatttcgattgtgtgaatatcggagtactccgtagcatgtcaacacctacacctattgatgagccttagaatctgatctcttcactttcatgatctcatctgtctcactgtgctccgtactcaacccctctttgcagccctaaccagccccatcacgaaatgcagggcacagggcacacactcggacgttgaaatatccaacagaacctacataatcgataccgagaacccgatcagggtgctgactatgttccccaaacaatcaagatgcaatcgaaatgcacctagagcgctgactacgcatcccctagtaccggtgggcctgtgtgtattccagacccaaccatcctcttcccgagagggagccagaccctgtcacaccaatagcactggtacgagctcgccaatttggttggcatccattctctatgctgtagtccacttcggccattcccctcttctccactcgacgatctcctcggaataggattggatgaccatggttggatgacatattgcaatcaaactgcagatttggataatttgaaaggagagggggttgggactggaattatatgttgtactctatacctaggtctctggcaacggggaattacgcgatgccgttgaacgtgcccagcccgcagagtggatagagtgctctctacccatacaataaaccctgtccataccatagctatacgaaaacatcaagctttgaagctattcccccttgtgtcttgaaaacaaagattctggtaagttttaccagtactatacgttctagaggcttaatctcgtccgaatcgatcgtagggatggtgagccccggttgaatttttttgtagcccgttttgcgcgcttgacatcacccattccttcctcatcttcacaattataggtccatcaattcgcatctgcaaggtctaagggcttgtaggacaatgagcgcttcgtaggtcattgttctaaggcgctttcttctttccgagggtctgctgtagaaaattcgcggtttcgtcaaggtgctccgctccacagtggccagatagaaattgaaaagcttcggaatcccacgatgtagctttgaaactgatttcctcttggactaacttagtggccttttcagcattcgtcgtatgacagtcgcgctcggaagagaatttgtcacgtctggtgaaagctggtgctctcgctgcggatcttcaccaccgaatatttggaactctggctcgttttctgcacgatcaagcatcggttgagtcacccgcaggagacctgtatccgcggaggcatgtcgggtcgtacgagatttgaaggcttgttcgccaatttcgtcagtgcaaaggaaatccttcgaagctaaggccccgaatcgcggattcttgtatctttcaccgatatgcctgcttaagaggaagaagaggtttttgatcaaacggctgtgcaaaatgcgtcccatgaggcatagaatagaagcagagagcattgtgttttatatataaatcgagatatagatgatgcaaaccatgaccgtcgaagaggagccgtttgtaccttcctaccgatcttctaggattctcccccaaaagtctaatggaatctataccaagctcatcttgtccacctggtttcggggatcgccactcaatatttgttagggacgttgatctcacggtaccaaagtcgagggtgcgttttgccctttaggaaaatgtatggaggtagtatgtcgccagtgtcccctcgccatattcctctatcggtgtttgccgtaatcgttcaagatacgaaagccagttcatcaagggtataatatattcatcggacgaacacccccggtggggatatactgctcaagttgatcagtaaactgctgaacgaggccaatatctccgcattattccatttcgtatcgatcgtacgacggttggcacctttgaactgcgatgggagtggtgcaaggaagcggtagatctagttctttccgagctcttgtggtcgttcccgcatagaatagatctccagggctggtttgctgccgtgatgaataagagataccatatctagaagcgtggcagtatcaaccgggactggccggccgcaattctgggccgatcattggacccacgcgggccgagccaaagctagcgcgcgtgtacatatcaggtgaatttcactctgtatcattggcaactcaacaaatgagtgcatgccagcgtcatttatatgagccactcatgtgcaaatcccacatgtcgcaacaggttcatcacagtggggatccaacgaatctatcgaccaatgcttaacaagatattgtaggggctaggctctcccctgtcgacagtcagcccattcgccttcgactctggggaaattatgaaaccgcagtcacctcctatgcgctcgggatggtcaacgcgttctattattgtctatccgatgacaactgagcatggtgttttctgcatcccaattacgctttgtacaactcgttctgatcttgttcggggccatttttatcctcttcaagctacgaccgagcattcacaaggcaaccgcccccatccagcagggctggagcgaccatcatgattgggacgactttggtgccatcataaatgacacccttggggtaatggttccatttcaatcttcacctggagctctttcgacttacgactatttaggttcaaaaagtcttcgccattaacctcatcagccggcctgataagcgcgacaatatcattctgggctcatccctcagcaatttccacgtcgaatggattgacggcgtgactccggatgaagtagatgccaaatcctatccatacgtatgtctccaaactcacacaatacacgcgacggctgatattttctagaactggaaccatggccataaacaggccgagtacgcggcccgacgggcacatctcaacggactccagcggtatgtggtctggaactgcaatatccgacatcaactaattatctcctagaattgtccaggagagactatcaagtgctattatcatggaagacgataccgactgggacgtatcaatcaaagcccagcttcaaagcttcgcccacgctgtccgagccctccagccccaggatagccggaatgtcccgactcagtcaccatacggcgacgactgggacatcctatggctaggccactgcggcgtgtcatgtagaactgatatgccattttaccttaccccgaatgatccgactatcccaatgccccatcactttcttccactgtggcgcgaccctccgacattcgaggggtacgagagacccgatcacagtcgacttgcgtgcacagcaagtgacgctgtctgctccatgctttatgccgtcagctacagtggtgcgcaacggattctcgcagcgttgtcggttaacccgtctggtcttgcagaagaaattgatattggtgcccaatttgacgtctcagttggacgcatgtgcggtaatggttatctgcggtgttttgcaccttatccatcgatcacgggcagcttccatcaggcagggtcaagggcaaagtcttccgatatcaacaatgagaccggtgaggtagaaggcttttccagctggggagtgatgtatagcacaatgctcaatatcgaccgtatcctgaagggggaacggaccgttcatgcaacatggggcgatgtagatgtgttggatgtcattcctgaagacatcacaatggagaaggggtctatctacatccctgagacgaagaacaggaactgaagctaacagaaagagaagttgttacatggcggtgaaatggatattagactatatgtacggaatctaaattgttcgcaatcttggagtaaataggaatgaattctatactacttcattcataggacctgtacgggaggaaatatctacacttgtctacgaagtctacaagccctggagagaagaatggataacgtaacacgttattgaagtaataataaacaaatccaggaaatatcatgaacccacgccgaaacacacgaacaaagggaaaaagaagaaaaaggtccatcaaaatcataatatggtacacgtgagaagccacgaccatgcacgaaactcaaagggaaacatccaaaagcattataaggaagacagcttagccctggcacatgatgcaagcatccttgttctcgatgctgcactgcagggcagcatccgagtagatatcgccctccgcagccctgctctcggcatcttcaggctcagcttcagcgccagcatcattggtcttggcctcgacagcgggggcagcagcaacaggtgcagccacagtgcgcggggtctcctcgacaggggcggcgaccttagcggtagcgggctcggcgccgttggcacggggaatggccgagtaagcggaggcaccggtgccgccgacacgcttcttagagcgagcgacgttggtgtcctcgaccaggagctgctcctgatcgacggtgaactgaatgggggcggaggcggccatggtacgcaggtagtacatgccggtcttcagacccatcttccagccagcgaagtgcatgctggtgagcttgcccatagtaggctccttaaggtggatgttaagggactgcgactgatcgatgtaggcaccgcggtcggcggccatctgcagaatgttgcgctgggagatctcccagacggtcttgtacagggccttgatatcggcggggatgttagggatgttctggacggaaccaccgtcggcaatgatgcggttcttcatgttgtcggaccacaggccgagatcgaccagatccttcaggagccaagggttcacgacctggaactcaccagccaggacacggcgggagtagatgttcgaggtgtagggctcgaagcactcgttgaaaccaagaatttgactggtactggcagtaggcataggagcgaccaacagactgttgcggacaccagtctcggcaatcttggccttcagggaggcccagtcccagagatcggtgggagtgcggtcccacatgtcgtactgcaggatgccctgcgagacgggagagccagggtaggtctcatagggacccagcttcttggcaatatcggaggaagcagtcaaggcaccgtggtagatggtctcgaagatctggatgttgagctgtctcgcctcgggggaatcgaatggcagacgcagagccaggaaagcatcagcaagaccgttgacaccaagagcgatggggcggtgacggaagttgctcttcttcgcctcaggaacggggtagtagttgatatcaatgatcttgttcaagttgtgaacgagaacctgcacgacctcgtggagcttgccaaagtcatactcgcctcgggcagagtcgacaaaggtggggagggcgagggaagccaggttgcaaacagccacctcatcaggggcactgtactcaatgatctcagtgcacaggttagagctgcgaatagtacccaggttcttctggttactcttcctgttgcaggcatccttgtagagcatgaaggggttaccagtctcggtctgggcctcgagaatggcataccagagtttctgagccttgatggtcttgcggccacggccctcttgctcgtacttggcgtaaagggcatcgaactcctcgccgtagacatcagccaggccgggagcctcgttggggcagaagagtgtccagtcaccgttggcctcaacgcgcttcataaagaggtcgggggtccacagagcgtagaaaaggtcacgggcacgaacctcctccttaccgtggttcttccgcagatcgaggaattcgaagacatcggcgtgccacggctccaggtagatagcaaaggcaccagggcgcttgttaccaccctggtcgacatagcgtgcggtgttgttaaacacacgcagcataggaacaataccgttggaggagccgttggttccaccaatgtaagaaccggtagcgcgaatgcggtggacattcagaccgataccaccggcggtcttggagatcatggcacaagtcttgagagtatcatagataccctcgatgctgtcagcgctcatgtcaaccaggaagcaagatgcaagctggggttggggagtagcggcattgaacagagtgggggaagcgtgggtgaagtacttctgggacatcaagtggtatgtctcaatggccttctcaatgtcctcgccgtggatgccgacagcaacacgcatcagcaagtgctgggggcgctcagcaacggtgccgttaatccgaaggaggtatgaacgctcgagggtcttgaatccgaagaagttgtagttgaagtcacggtcgtacacaattgccgagttgagctcctcggcatgcttcataacaatctcatagtgctcctttgagatcataggagcaggcttattgttcttggggttcacataatggtagagatcggagatgaccatagagaattgcttttttgtttgcttgtggaggttcgaaacggcgatacgtgcagccagaatggcgtagtcagggtgtgtaacagtcatgtatgcggcggtctcggcagcctgagatttagatgttaacataatgcctcaagctgggggtaagcagacataccaggttatccagctcaatggtgccaacaccctggtaaacgccagagatgaccttctgggtgatggctgcagcatcaatgtgctcggggtcaaggccataacagagcctcgagacacgtgcggtaatcttgtcgaactgcacgcgttccttgcgtccatctgcagtttgtattcgcgttagccctcaatctgaaacgtgaggcaagctcaggtggctgtggcgagatggaggagcagaagctatctctcgccaccaatgtctcttgagtatcagacgatcatatatgcacttacctctcttgtagacgaacattttgaaaatattgatgaggtgataggggctggaaagaagagaaagaagagaacaggggggtatcaagatcacagtaggaggattgagatgatattagagtatacagaaaggggggggggagatgtaagcccgtagaggggtgtgagaagaagaagagatcagaggggcagaggaatctttggttgccgagtggacgcgttgtcttttcgcgtgcccgcgttttttcagcttaccaacagagggatccacctttgctttcagacctcaacgccaggcagaaactgtccatttataccagatggagttagtgcggtggtactaacgatcctagcgtgggtttactagcgaggatatagaaggcggtgtggatcgagaacaggcggtgaaaatgtgccttgcaggtcgtggatggtcacgtgagcacgcgaatggtcgcgcatggaaacatggcatcggaagggttgccgccgagcggcctgaagcattccgggctcagatgatcttcaagttccaaggctacgtgtagattgaagttaggtttttacagctttaagttcgcccgatgccctagtcacaacatcatatgcaaccccgattcgaaccttgcgacccttgctgcattcattacacatcaatgtgatggatctacatcgcattctcatcaagggggcaagaggtgcggggataacttcgagaataccttgtatggactgttcgttctcttctactaggagaatacgctggcgtcttttggtcattgattggatccatttgaatctgtccacatcgactgattggcaattgaggcagacataactgttttcaataattgtgctgtacgaagtgaagagcacataaatcaatgcgatattggcaaataagaagataaaggttcaagatcaaatattggcatcaacgagcaacatatcaaagaattcgaaccacatccctgaacgacgataattcagatcagatcgaaaggagcaacatcaaggctaataatatatgctcatggatattcgcgttaggctgctctcagtcaatgccgggttcttacagcaaagcagcagcgccgaggaacaccgcagcaacaaaggtggtggagagctggcggtcggacgaagcggcgttgaaggtcgaagtaggggacgcggcggcaccagactcggaggcggtgccattgctgactcccgaggtaccggcggcagcactggtgccagtgccagtagcgacggcagaggaaccagtctgggtagcagtgacgaagccggtggcggtagaggtctcagaagtgccggtagcggtagaaacattagtctctaaagagaagataataagtaagtaaccgattcaatgatataacgtggtgttgggtatgtgttgatccttaccaactttgtggccgagctgggcgcagttgttggcgaagaacttcagggaggcctcgctatcggcacagttcttggagatagtggactggatcttgctggcgttcgagccgcagatagccttcgaatcggctgggttgggttgctggctagatgtcatcagtatcaagactccactgggcattccttccattccttcgaacacacccgataaccttgagaacacaggccggggtctgcacggcaatcacgacattagccagagccacaatggcaatagcaaagatcgacttgttgaagagcatgatgaaagattggggatcaaagatcgaggattggaaatggaaagattggattcaagatcgcacagcgagtctggagtaaaaagagtgtgttgggctaaagagcgactgtagagagtgtggaagagtggaagagtggaagacaaagagtgacgaagtggtaaggaagataaggtctcgaccagaggaaaacgggggggagagaaatcgggcaaccacagtttcatcacaatctggaaaccacgatgggggttcaggatctgttacgttacattaatatccttacagagatgtacccctattattatgggtccatattagtggtactttacagtacgtgtcattttaatacatgtatcttttgttccccatagcctgtgacacttcggctccgaaagtggtttagcgtcagggacctgtccccagatacaggagagcgtcaactgtcagtcttgaggtgtaagggaacatatggatgtgctacttgagaggtttcaaggttatatttgaaggtattaatcttaggagtggtattcggaaggattccaggtaaggcaaaattgttttgattttctttttcccattaatttgtgtcttagtggctgatccagatggggattagagggtttgagctctattaataacctcactttacctctagggctagatgcaccaaccttggaaggttagaacgcaataagatgtacttatgtggtgtgaccaatcctacctacctacctaggtaggtaggtctcgagtagtaataggctttaatcacagactaacatttcaatgttccactaacgcaaatctatttttttgtcgcactagaacgaccaaaatgtcagtggactcccgaggtcataaaatccctcggatcagagtttaagtttggtttgatgggttcgtcagctctatcaacaccccgctgggtcatcattggagccccatattcttggccgagaacgacgatccattcacttccatgctcctccatcgacttgaagatcttctctgcctccacccgtggtctctcaaagcaagaaaagactactataacatgtcgagctggaaggccagacataagcgaagtgcgggggtcatttggtggcagtgtgggatgtgatcagaatccaccaaaacggatgacagacggatacaagagggcaagttacgttcgacgcatatgtacggtaggcaccactctccgcctctgtctataatctgatacaatttgaccaatatatgattggggcataataataggaacgttacctaaaagcttatcgtcggattttataacctagaaccaagcttcgtcgacaatcccactcacatgcatcttgacgtctcctatggaggtataactaagtgagatatgctgccgccgtgattgtgaccgtatttgagtgtaatgggctaccttggttaatcgtaagtgctatataatccaagcatgaacgagtctggggactaaggaacttcttatcgagtcctagttgggccttgatgtgcggaagctattcccacataaaacaaagttaggatattcatatcaaaatagtattaactctgtacatcatatgcctttgtaagatcaacacttgaacacattgcccgctcgtcataacttctcccaaacaggatcaaaaatactagtaacaacctcctgcaccggcagcctttgatccacgatctccctcccattaaccaaatcattctctctagccctctcatccgcctcagcttcatccctcgcaatcccagccttaacatgcctaaccaccaacctcttcctcgcaacctcaaagtcaacatccacaaaccaaagctcgtccatcaacccagcagccgttctccacggctcccgatccaagctaagataattcccttcaaaaaacaacacccgacaactcgccgggatggcaatatccccatcaacaggatccttaatagcatggtcaaagcttggcgcgtagagacagcccgtccgggccgtaagcggttcccgcagagctcgtacaagctcgaggaacttctcgccgtcgaaagtaaacgccgcacctcgtcgcgcggccgcattgaccggatctggcatggcggctaggtgtgcgcgcgtgaggtggtacccgtccattgggagggcgatggctatcggtgttggtgtttttgggttctccgaggtgtagattttgttaattcgcgctgccatcattgttgctaggcctgttttgccggagcctgggatgccgctgatggcgatcattaggcgcgcgtcgtctgctgttgagcagaattttgctggggtgggttgttagcgtttggacgtgatcatgaggtttgggagggcgtggacgtgacagagcgcatgtttcaagcgcttattcttagatgcgtagatggagatttacttaccccaggtcttgttgaccagtcggtctacctgttgatccatggttgactagtgaggtctgggatcaaatgtgtatggaaatatccggagagttggggttgcgcaaggtgtgatacgagtgttgatcggcgtacagtcaatgtttgacggatctaactactttgtatttgttacttgcctgagttgttgaacctaagcataacttcccccgaacatattggcggggctcttccgagtggggactgctgtactccgagacatacgtcactttaacttgtcaggtacacctttatttattggaatgcctgttttatattcatcctctagaccgtgcggtatccaaaaatgtgaatatctacaagaaagatgggtctttgtccgtctgttcaattaaaatcggtagataaaccggacggaatatgaaggcaagaatgttaagatcacaagacagcctcaaaaggacctgtcaacctgtcaacgccgtcgcaaaagcaaactagaaagtgtgccgtgtaaaattcgccggaaaacgccattgccaatatcgccaatatcaaatttcatgtcattccctatcacaacctgggcggctgtgttcaattgttgccattggctcgagaagcgccctcggtgtcggtggagtccatgctcgcattgagaccacggtcgagagtgcgtgcaaggccagccgcggcccaccagtcgtcgggaatatcctcacggcgggcaagtcgatccaggatgacctgcatgtggtggagatcatcattttggtggcgacgatcggagagggtgggattttggtcgtgcccgtcggagagagcaagaacgcttgcaggaatgattgtagggataggaacgggaggatggctgctcattgtggaatggtggtcgggaataatgcctgcccgtcccatgaattcctggagagcagagggatgatcctcgtcatcggaagaaaagtcacaagggttcagttggtcaggataggggtcaagtccgaagtgggcacgggaagcttccgcgttcatcggctgcgtcaagttgacagaggttcgagaacgagcattgcgcgaaatatctgggacagcggcagaagttgaggtgaaagaagtattagtggatggaagagtcgcatctggtgtaatggttgagagcaaagtctcccacgcatcggtttcccgctctccatctgggctgggactgcgctggcgatccccaagcccgtctacgacggggtctcgggttcgtcgagtttgtgtgttgtgggaccgggtttctggtgggaatgaggtattggaggcgcgatcactgttatatctgtcacgcatagggggcagacgcacgccgctgtccgagggagtcgaagaagcgctggtgtggtatgcgagggcgggagcgaagttgggagtcaatgacgggctggcatgggtattcctaggctgaccgtccatgcgaccgagcatatcggtcaagacttgatcgcgatggttcctgaatatctggttggctagctctctctcagtgtgtgggggcggctggttggctgtctctgcctgcctcgcagcgcgcgactgagcccagttgatgagcatttcccggtcggccggttccatagctactgcattctcgatagccccatgtggcgtgataaaagaaaagcgcggcacgcgtctaggttccacggcgccgcgtcggagctcatcgatgatctgtgaatgaaacgaagccaagacatcggcacgccgcacgcgggagctactgtgtcgcgacggtcctcggcgaatcgacgagcgtgcagtagaagatgagtccttttccaaagcagacttagatgcttcagatttggagggctcacgccacatactaaagatcaaagttagcattgtatcgcgaagcagtggcgcatgcgatggcttcgcgcgccaatgtgaagatgagatgacttacgggatacccattttgctttggggctaaaagaaagagacaaaagaacaaagatatttggaaaagaaggacaaataaccggaaaggcaattattgaactagtagaacacgacttgcgataacggtggagatggttgatggagacgggggagattgggttttttcgcctgaggctgggggtggctaaagtggctaggtcacgtgcgtattaatctttcaatagcacacttgtgcaatgtctttttaggcaaccaatatggaggattgcttcgtaactctttattcaaattaactgatgaatgtctgaattctataactaagcacctctcatattgtagcaaagagaagagatcgatgcctgaggcataatataagatcacgtggggatattcctccgatcacgggaagctccgaccttttgaaggtggactaccgtaggctacgctcattttggctttgcttttcttactgacaatgaagctttgaagtcctaaacctgtgtgttgctagcttatcctttcgtcaataatgacaattgaccgcgaaattgctatcacgctacactccgaggaatgattgaattaggattgagtcgggttgcgagtctgcttcagcagactccgctgtcatggaaggccgttcacattgctggaaccaacggtaaaggatctatcagtgcctacctctcccatttgctgtccaccggcggagtgcgttgcggccgcttcacttccccgcatttaattgatcggtgggactgtattacaattggagagaaagtggtccaggaatcccttttccgacagttcgaagaccaagtcaaactacgagatcaaaccctaggcatcggtgcctccgaattcgaattgttgaccgcaacagcgttcgagatattcaaccatgaacgggtcgaagttggtgtggtcgaggtgggcatgggaggccgtctagatgcaacaaatatcctgaataatgtcctcgtctcggtcattacaaagataggggtagaccaccaggctttccttggatcgaccattggggagattgctcgtgagaaggcgggcatcctcaaacccggagtcccttgtgtggtagacaatacaaacagcccggaagtggtcgcaactgtgagggcccgcatacaagaactgggtattgattccttgtttgtctctcctgcaacggtctccgaacaaatcccggcactcgcaccttacttccagaagtttgatctagagcctcaccaacaagaaaacatgtgctgcgcagtatccgcacttcgtcttgccctttctcaactacgacctgagatggatgcattctcgttgcttccatacctggccgatgtaacatggccgggccgtttgcaaaacattatcctccgatctttgatcggtcgtgcagagcctatcctgctcgacggtgcccacaatgtgcagtctgccgaagtcctcggaaagtacgttgaccgcaaaatgcgtgttcaaggccaaccggtgacttgggttgttgctgcatcaagtggaaaggacctggccggtgtgtttggttccattatccggcccggagaccgagttgccaccgccgagtttggtcccgtggatggaatgccctgggtccagccaactaacgccaaagagctcgcctcgtcccttcaagctatccaaaatattggccaagtccagagctttgaaggggatttgctccccgccattcagtgggctagccaggaggcccaaggggggcctcttgtcattgctggtagcttgtaccttgtttctgatgtgttgcgccttctccgtgcccaaaaatgataccctctatagaattgattggattccccgatctatatcagtaaataatagaattctacggcaacaacaagccttttatttcctttcccacctctcatcccttgtaataaactgcgctacgcgttaacctattgtatcctgtattcttttttggtcaaatgctaaaaaattgcaccaaactgggtattatagggctgatcggcgattgtccaacacagcctgcatgatgcggcgggtggagcacgaaagttcaaaacaaccacgatttctttgcgaacgacccctttcacgccctattgccgtctctattagatcgatatttttcagggctctccatggtgattgtattcatctgaagatcttacatgcgcctcgatttgtcgtggaaacggctctctagggcgtgagagctgaagtgctgtaatgttcacttggtgagaccctccccacaacgtccgcacgcgaacgctcattcgtgatgcttgtttgtgcattgatagactcggactaattgccaataatgattgccagaacctgtggacatgacctctgagaccgttgctctcagcacttctaaggttgcctccttcctcggctttcaccccaccccccgcctccatctaaaaccgcatcgtgagaccgacagccaactcgaacacgtattaggatacggtcgatcctagtccgctgcatcatggttgctcgacccggcgaagggagcgaagggcagcctcgccctctcaccccctcctcgagaacccccggaacaccgataaagccgcgattgacacgagtcggaacgagtccgacaaagcgagaagagaaaccgaaggaagataaagttttgaagtcgtcggcaaaagatgttgcagagcttaaggactatgtatggatataacgccctgttttcccgcaaacatggattgggcagatgctgaccttgggtgttgatgttagcaactgggagactgcctaggcaaaggagctttcggttccgtgtaccgcgcgttgaattggaatactggggagactgtcgccgtcaagcaaatcaagttgacggaccttcccaagagtgaattgcgcgttattatggtatgggattaaaccaatctcggcgttcatctgatgtgctaacacgcgacgcaacagcttgaaattgacctactcaaaaatctcgatgtgagacaccccgtcaagacatatcaaaccctgtactgatataaatccttgcagcaccccaacattgtgaagtaccatggatttgtgaagtccgctgaaactttgaacatcattctcgagtatgtgttacccggcccaaattcaacggaacatggcattgatggtttataggtattgcgaaaatggttcgttgcattcgattgcgaagaactttggtcgtttccctgagaaccttgtgggactttatatgtcccaggttcttcacggtctactctatttgcacgaacagggtgttattcaccgagatatcaagggtgcgaacattctgaccacaaaggaagggctcgtcaagcttgcagatttcggtgtggcgagtcggaccacaggcttgagtgaatcaagcgtggttggtacgccgtactggatggcgcccgaagtaatcgagctttcaggcgcaacaacagcttccgatatctggagtttagggtgcactgtcatcgagctactcgagggaaagcctccttatcataacatgcagcccatgccagcattatttcgtattgtaaacgatgatcaccctccattttcccagggtgcctcgccggtatgtcttttttggtttctcaggcatatgtataaaacgctgaccttatctaggccgtgaaagactttctcatgcaatgtttccaaaaagatcccaaccttcgagtctcggcaagaaagttgcttaaacatccgtggattgtcaatgcgcgcagaaccgaatctgtcatccccaagaagtctacagaatatgaggaagctgtcaagagtgtccaagaatggaacgaggctttgcgatcaccggagaccggaacttcaaagaaaaagcagaggccagaccatcccagtacctcaggcctgtcatctacccggaataacccattagtcgatagcctgccatccccgacctctatcaaatccacggatcgcttccgctcgcctgtgttagcaggggatgacaattgggacgatgactttgctactgcaatctctcctagcgcactcaagctgccccatctacggccacatgataactttgggggcatgctgtcttccgagagacttaaagctttcgcgtcacttgatgggactatactcaaatcggatgataattctgatccctttgaggatacctcaggcttctcagacgacgatttgcagaccattcgcccatatcccgtcaaaccttctgtagcagagccttcaaaacctcaaagctctgcagtctcccagcccggacccaatgcccccgtttctgcattgcaaaatgtcccgattctcacccaaaatcccatgccgagacgcactcgaccggctcctcgtacgaccaatctctataaagagaacactgtcgacgattattcagatctcattatggccaacgaggatgaactagatcgaaaactgggtggttatcaggtacagtccttggcaagacttcgagttccatgtgtgattctaacgttttttaggattttgaggatgacccctcgtcgcccattcatgaaaacataggatacaaccaagtagatgatgaatttggtggcccgcatccccagctgcgcaagcagctttctgtgaagcgcgaccgctctaccattgagatccagaggtttgccgagaatgaaaatgatgaggacttctctgatatccttggcgccggtcaagctgctttggataaggcagagagcgaagatggctcagatcaaagcacattgatgctaaactcgaagctgtctaactcatggctaggagaccaagaagacgaggatgacccctttgcgcaattggaagaaggctttgatgaagttgacctggaagaaaacatcgcacgcgataaatacgcacgtcttcgcaaccaggttgagggtcttgtggactctctcaagacatctcaagacgaagaagttcttgcggagatttctgaacaattgttcacgattttctgtgacctcccagagactaaaaacatcatcatcagtgctcacggtatgctgccaattctcgagattcttgacaccactcgccggcgtgatatcgtcttctgtctgttgagggttgtcaacgcaatcatctacgatgactatgaggtacaggagaacctttgcttcgtcggtggaatccctataatcaatgagtttgcgtccaagaagtacccccgcgaaattcgacttgaagctgcggctttcgtgcagcagatgtaccagacttccaccctgacactccagatgtttgtcagtgctggaggcttgaatgtccttgtcgagttcctagaggacgattacgaggacgaacgcgaactagtcttgattggcgtaaacggaatctggagtgtcttcgagttgcaagtaagtatttcaccttcgttgcactttgcactcggatctaattattttctatagggctccacccccaagaacgatttctgcagaatcttgtcccgcaattctgttcttgaccccttatctcttgttctaagtcgtgctctcgatgaagatggggagctgacagaagtcatcgagggtcgtattgccaatatcttcttcatcttctcgcaggccgagaatcatgtcaaggagatggtttctgaacgaacagtgttgcacagtaaggattatttcttccaataaacctttgcaaagttctacgctaacaatttattcaaggagtcttgaaagaattgaggcgaatgagtccagttcatcagattacgatgttgaaattcatcaaaaatctgtcgatgctttcaaccactctagattccctccagaactccaacgccatcgatgtcttaaccgatctgcttcgatcgaacctgagaaaatcccacttccgcgagctctcaaaccagatcctcaacaccatctacaatatgtgccgcctgaacaagtctcggcaagaagatgctgcattgaacggtattgtaccgcttttgcaaaagatcgtactcacagagcggccgctgaaagagtttgccctgccaattctctgtgacatggcacaatctgggaaagttggccgtagggagctgtggcgcaacaagggcctgggcttttacatctctttgctcttggatccatattggcaagtcactgctttggatgctattttcacatggtttgtctcccgtttcgatagcgtagttggtcccgaggctgacaatgaataataattaggcttcaggaagaaaccgccaaggtcgaagagcatctcttggatggtatatttgagagcgatacatttgagggccctatttcattcactgatgccattgcggaatgtttgaagctttccaaagctaacgcattcgaaaacactctcgaacctctgcaaaagcttctccgactcagtcctccagtcgcatccacctttgcgcggcccgacattttgcagagactgcggcagaagctgcaccacacaaaagccgccgtccgactcaatcttttgcgtataatcgccagcatctgcgattcaaacgaagagcaaggtgggctactcgcaacctatggtcttctcgacgctattcggaacatggagaacgaccccgcagtccttgtcagagatatggcaggcaagctcgttcgatctagcgaggcatatggcgtcagtaaacgcagaccggcagcccggcggcaaagcacgtgcactccccctccaatcttattctcggcatcatctaccccatccacaccttcttcgcaccgcgccggccagtccagaggatatctggaaggccgggacactccccggcacccacggaattctctcagtgtttcttcgcttgctatgagacctggcagtcgggatggcaacaatccggttcttggatctgccgccaatggaagcagtgcggccgctgccagacccaggtctgcccgacccctctctagtagaatgactcacgttgagctgttgcgtgaggaagacaacaagactccaagctcgctaagtcggcgaccttcaattatccctcgtcgccgccgcccgaccctcgcagactctgagtggacgtaatttgacgtccgaaagcgtctattgcgatcaaatgtttgtgttgtttcgatttctccaggtcatagtagcctttcatacacagcaacggcgttgtcaactctaaatggactttgggggtgatggtgcatggctttcctactttgtaaaacccctttgttattatgtgagcactggttgctgcacatagagtctatggtttccctttctgttcaaatcaataattctttctaatttgcacaagtgtctttttgagtaatctaatatgtacaacattgtacaataggcatatcaagggcgtatgttggtggctcgaggccagcccttgatatagtttcaaccccattctctcgttcgatacgaagttatgcttcttttggacttgtttcgctatcatatctacaggccaatcccatccttcaactgattcaacaccaatataactatgacgtctgttatgggctgatctatagatctcgggatcacgtggagcgtcgaagccgattggcggcgagaaccgtgaaaaatctctctgagccgacaaagatcatacgatgaattgagcccagaaacgcctacaagccctatcagtcccttcctcttttcttttggcttttttctctatccggtggccttcgcttcggcatgagcgcagcgcttcgcctgccgttgcgggcattcaagattgatcccgttacggtagtcgggagaacgtccaaaccctcaacacctgcatcctcgtttcttctggcttcgaactggccgctacggcaatcgccttcttccggtgtgatcaatgctccatcatggggtcgttcagtgtcctcccggggctcgaccctcgccgcttcacgccgttctttttctgagaaggcttcgcctctcttgtctccgaagactaagagccagcacaagtccgaaaatgagcccaatatgagtgcgtcgcagcgaagtatgatcaaatggtttataattggaagtatcctcggtttgggcgcagtgacgttctccgatcaagcccagcatgcattacaggcggcgaaacgcagcgggcgcgtcgttggcacattagctgtctgtatcaacgagtaagtgcactgcctctctagccccattctatgttgcgcctcgacgaaatcgctaacgcaacctcgaatcttcgcagctaccgtgttaccctgaaacaagaggcctcgtcccccgaagaacagaatgcactgattagcgcatgccacaagcgatgcgccgagcgtacactccgtgtcctggaaaagaatggatcgattttcattaaattgggccagcacctcagcagcatgggctacttgcttcccatcgaatggacatcgaccttcatcccactccaggacaaatgccccgtttcatcaattgagtcaattgccgagttgttccgcaaggacacaggccaggatattaccgagctgttcgcctcgtttgaatcgaggcccattggtgctgcatcactggctcaggtgcacattgctacgttgaaggaaaccgggcaaaaggtcgctgttaaagtccagcaccccgcgctggatgaatgggtgccgttagacttggctttgactcgattcactttctctatgctcaagcgcttcttccctgaatatgacctggaatggttgtccaaggaaatggatttctcgctaccgcaagagctggacttccgaatggaagcccagaatgctacccatgccagcgagtacttcaaagagcactccgatgctccactagtcattcctgaaggtccgtaattctgccaatgctgactttatgcgtatgatttgaaactaactagaccccagtgatgtggtcccaaaagcgtatcctggtcatggagtacatcgcaggccaccgccccgacgacctggagtacctggacgccaacaacatcgaccgtgacgaagtttccgccgctctcgcgcacgtcttcaatgagatgattttcggagacaacgccccactccactgcgatcctcacggcggcaacatcgccatccgccccaaccacacccgctcacaccccaacttcgacatcgtcctctatgaccacggactctaccgcaacatcgaccgcgacctgcgccgcaactacgccaagctgtggctagccgttattgacgcagacgtgccgcggatgcgcgagttcgcgtacaaggtcgccggcgtcacggacaagcagttcccgctctttgccagcgctattacaggtagagactacagcgttctcacaaacgaaagcgtcgtttctgcgcgaacggctaaagagaaagatgatatctcgggtgcattgggtgaaggcatgctgcaacagctggttgtcttgctaggccaagttccgcggattattcttctcatcctgaagaccaacgatctcagtatgtattcactttttgactctcaattcttttggatatcatcgactaactccctcccagctcgcagtctagacgagaaccttcacacgcgtcagggtccaatgcgctctttccttatcctcgcacgatacgctacgcgcactgtctttgaagagcagctagaaattattaaggagtctggcggtgtgttccgcaacctcttccgcttcatttgtgcctacgcgagctaccttcgcgtcgaggtcaagttgtctgtttatgagactgtgctgtcattgaagactcgcttcggcctccggagtgtttagacggtttctttttttgcggatggcttgtgcttcatatctttcctttgtttgttctgtttttccattatatcccttggttttgttttggttcattggcacggattgtcttgagtggtctgtctgtgcatcagcgatggcgttctatacttcttttcacatatggcctcttcgtctcttgcgtggattgttagagggtggattgtcctacgtttccaggtttcgttctgctatgatttttgcagaaagcaaagattctagtgtgatcttgtacaaatagatagattgtggataatttataaatcatagacttcttcttatattccaagtctacctatgtacttgatttcctctgccattcattggctttcccattctgttttagtgctcagccctcgttgcttttcctcagactcagctacgcagagtcttacctaggtaacatcccaaagtctacctaggtattctcggttattctcatgctctgctcctggtatcctagcccgggcacatcgctgcggtaccttggtgtcatttgggcgcgaagctgaggtcaagctgcctgtcgctgctcggacaggagactattttcggagagaatgataatcgcatgggatccgtttgtcgatgtattgcagccatgtctagaattgagctggtgatccataaaggcaactagcgcagagaagagagcttcacttgcactatcagacttgtgtaagagactgaaattcgatgccgctactgtctgttgaaagactaatacttccaagtctacttttacaaaagggtaactattctggtatcactgtttcattggaaactatcaaggcgctgcttttcagaaaatggagatgagagtatcgatcaaggatcccacataccgaggcgccgtcgcagaaaagaaaaaaaagaagaaacaagacgtatcgtgaaaagaaaaagggaaatatgtacatcaaagaaatgggcaacttgttcgttttcatctcgtccatcgtcatctcttggcgcacattttcagcgacatcaagtacaacgaatcccaaatgcacatcagttctcgtcaattgtccgacgagaacaagcatccttgatcaaatgattgtgtattaagacaacctcggaattaaaatcgcagagttcgtgaaacgaaacgagtgagttgcgtcattccgacagcatcacaccgtcaaaggagaaacgaatttaagcagcaggactggtggtagtctcaaccgtaacatcaggaatgacgccgcccgtcccagagagatcagtggcacgggtgttggggttcttggtgtagtagttggcaatagcagacttgatagcgtcctcagcgagcatagagcagtgcactaagaatatgttagcatgtgaaccgatcaaaaccatcacgggggggcatacgcttgacagggggcagacacaactccttcgccacatcggtgttcttaatctttccagcctcgtcgagggtcataccgcgcacgagttcagtcaggtaactggacgaagcgatggcactaccacagccgaaggtcttgaagacgacgtcgtcgatacggccggagtccttgttcacgcggatctgcaacttcatgacatcgccacaggcgggcgcgccgacgagaccggtaccgacatcctggtcgcccttcttcatggagccgacattgcgggggttgttgtagtggtccaggaccttctcgtggtatcctctgcgctgttgggctggggcgggagcagcacggcggatggcgggttgagcggactgcaggccggcgaggggagaaagggtgctgcgagtggcgatggagccgacgcggggagcaacggtgactaggcgcttgaacattgttggattattatgatggggtatcgttgatgttggatttgttttgagaggtgatgtgttgaaggcgaaaaaagatggatctgatagggagaaagtgatgaattcataaataatctgatcgggtcttagataagcacgctagtcctaatggggtagtctctttggccggatccgccggtcgtcggagattacaaagatgacgttcttttatttctttcggtcttctcgaatttgatatttcagtgagagggggaaaagttggggatttatctctctatgccagtgataatgcgtgctggtgatatcagttctcaggggtggcgacctttctgcaccactcaagttctccgcggtggactcgaccggtgaacgtcttgtttcccgcccctctctaagccaattgttgggcaatgatatcaaattgtggagagaagtgataggcatagaaagacaacccgggcgatcaattatcagtccgatatttgctgtatttcgaccattcgaatacaatatatgtttatcgagctattactacatttgcgtatctaaataatacagagagaggccttgttcccgcggagttacattcggagacaaagtcggagtataattccccttctcggcttattccaatcgggatattcattcccgaatgaggaagaaagtacatgcgtacgaggctaaatatatctatcctcggcattgttcaaacatgggccatttgctagtcaagggttatatatagcaaagtccattcacgaattgggccttttttgtccttttctaatgtctacccatgagaaggggcaggaaatatccatgtaaccagacatctaaaagattacctgaggagaccaccggaatggactgcctgaaaagaccaccaggctacggctacggccgcataagcagccgactatccttgtatgatacaactatgaaagtctcccatcctacggatagaacagaaacacttggcaaaatcaaggcatctagatgcagagtcgctttcattcaatatatcagacgacaaatctcgacccaacccaaagctaaacactacatcgatatgcaaattacaaagcctcacgaacagcagacttgaactaaaccaggcgacaaattagccaagagcaaagaagaccaaacggataacataccgggataatctgcgcattctccatatcccacacaccagaagtggtatagatatcattgttaagtagctcaagcacctgagcctcattctccgcaacagcaagcatcatgcttcccttgaaagagggtgtctcgccatcagcggggtgagcattgagcattgcgcctgagaagagacgatccatgtcagtatatgtacgtgcgcttgaaggactttccacggcactatctagacaaggaaaacacaataaaagtaaatgagacacgtaccaccggcaacaatagcaccactcgcaacgttaggcttaacaccctcgaggtgcttactgaacacacattagcaagacgaacttcccactacgcacgtcccatccggactctagatgccaggaaagactcacgggcgaacctcgagacgcttggcctgcgcgccgggcttatcgggcaggatgcagaggaactctttcttggcaggggcggaagacatattgcgggattggaaggttaggattgattttcttgattttctggggattgtagtcgaggctgaggagaataagtgtgatggcgggacgcggaggaatgattgccgcgcgtgggggaaagcgggggctttgctttgaagggcgcgggtgagatggagtgacattgtgaagggaatgaaggaaatagaatgaaaaccaattgatttggattggggtttctgtccaagtgtataaagtatgtgcaaggtacatgcgatgtataccgaacttttttttccctagggggcctttcctatttgagcttttatgatagccctggaggctcaatgagtatgtcagcaccggcatgattatgggtcacgtgcatgatatctagctggatagaggatgtaggaggtcgaaggaggttgaggctcagcaaggcggatagcttcattcgtgaaatactagagcatacggcctgtgtgtttgcagggaatggaatcgtgcaattgattatatacatgaaccccagcaggtaggccacagcacgggtatctgccttgcttcatctgcaagaaatctagactcatcacacagcatctggatttcaactgagttggtctgatatcctgcctctcatctcaaaaagccagtcaaagacgccagctcagcatatgacaaaatgaaaaaagatgaaatggaaaggacaatttgggaaatgacctgcgtagcagaatcagaatcagaatcaaatagaggaaacaagaaaaagacacatagaagacggcccggttctccctaatgtaggttttgcgcagatgatcgagatggaactcgagtgtacatgcccggatatacacatccccataagggatgtgtgtcccaatacaaagtatatcaaggcctggagaaccggcgaactgtatagacctgcgaacccgccaaacaacattttcccccgtagcgccaaggtaacaaatacacacactccctagaacgcggcacgaagatactgtattagggaagtcattaggcttcccgtcgcgaaacatccatccaagaaaaagaagaaaaaggaaaagaaaatgcgtcggaagtgaaagaagtgaaatgggccgtggttagaagctgtcccagatggtaatcatgagaagacaacacacgggcggtagggagactggtggatgttcggacggggtgggatcaaagatcaacttgatcccaagcgagatttccggcggacggaatgcagaaactagaacgctttacggtctccaaggttgccgggcttctcgtcggtatcaatgtgccacaccacgtagttgggcagtccaaccacctggtagccagctcgcttggccatgcgggcgaaaccttcggtctcggcttggttctcgaaggcgtatgcggggaagttaatgccggagcggtgcacgtcggccttgacgaggatgttgacaccaccaattccgtcaagctccacctcatcgtccttgttgttccgccagtcgcccatgccgaccaagtaggtgcggccagtgtcgtactctttgtagccctcggccagaacggtgtcggtaggcagactcgcgcggagacggcggcccttgtcggattcgatccatgaattgtagtcaactaggagtgaagatgtcagcaatctgcatagcacataggatgtcacgggtatacatacagcgaccctcgatgtcatggccatcctggttataacggtggaaccaaatgtctaaaagaaatcagtcagccagctgtccaaattccgatccaaattccatgcaaaatcacatacttggaacgaggatatccttatcgtgggccatgaagtcctccaggatacgctcgggacagtcggtaatgtccacgtcgcgccagtacacccaggagtgatcggccttcagagcggagtagaggaggtaattccgggcacgggcgatagccttgcgtcgtggaccctgtgcggcgaacgagtgtcgctccgccacagtcatctcaacgtcggcaccgaagtccttctggataatggttgcgctgcggaagcgaactttctcctcggcgtggttttggatgcgatcgagttcggaggcgaggttggcgagggtgtcgtccttgcagtcaccaacaaggaaggccagatcgatcaaatcgtgtgggtaggaaagtttgtaaaggaggtcgaagtatttggccaggtaaggagcggcatcacgaagaggggtcaggatgagtacacgttcgcggttgagagcggccttggaggtggacttgatggggttcaggtcgagatcggtgatagtggtggagttgacttcgtagggttcgtggcggttaaagaggacgggggtctgggcgtgggcactccattcgaccatctcgttaatggacatctccatgggtgacttgttcgagccatagcagtagaagctgtttgggcgctgcgtcagtatggaagagtctccggaggggtgcgcgttctctcacctttgcatctcagatgcagacctgctgacaccgcgccacatgaggatgagcagacccgtcaaggctatggataccaagaaacgagtccgtgttaataaaacgaggattgccctccatggcggcaatctggccttggccgatttccaattaacaccaccctttggcagcagcatgatgagaggtaatgtgagttgtgtagaattccaggggcgatcccgtctcgaacactcgtaaaaaccccccgaacgaatgtagagaagaggaggatcgagagtggtgaagcgaagggttatgttgtagggagaaaacaagaagggaatcgggggaaatgcgattgccaagaacgaagaacggctgaattcagttaagacaactacatctctctggcattttgctattttgctatattctgagtataattgttactacatatgtaaacattagatctattccattattctactatcctactggaatcaaataatatcggatgattcacctgggcaccagtctgacagccgagaccctttttccttatttttatttatagcctcgtctagaacctcacttagggggctattggatattaccagtatgactatatcaccattattttctacctaattttctgctagttggaccgagtacgaagtactaagtagagagtactttgctctgtaacccctattattcacacctgtagccacgttagccacttttctgcagggattgcgtgtacctactttcacaccatctttagtatgtaaacttgtatttatatttcgcccttcttttcctttttttttaccttccctggaatcccatccattccaaattagtcacaaagtacaaaaagaaagcagttgaaaattactgggatctccaacacgaggctaaagtgagacacgggacccaacccatattgtatatgtgtacagatggaggatgttgtatatagacacctctatttccacacttcaaaccacaactagcataattttgaactgctaaagaaaaaaaatcaatccaacctccgaaatctcatccaaactcgggaaacacttggccgtttcacaatgtctggactggtctccacctagcctgaggcctttgatcgacagctgattcgtccttgaagaaatctcttatgatatcgcttggaaactgttcgcattctgatgtcgtaggcccagtatccgaagaatgttgaagaaatgactgtatgtttatacgatccaccgaaaaggagggggggggatatatcttgaccagcctaaacaatgtatatcgtggtctaatgtagagcgagcgattatatatatctacagtgtgcagactatcaacatggaatccatcatttgctaaatggctgtattgtgattaatgaacacatcatactttaaccactccacggccggagggaaagctttatacagcaaagctcaacgcgtgctacaatctaccgacattactactgtgatcctacagaggaacatcattttcatcaagcattgagtcgtaactatagacatagaaaagaagaaaagtgacaaaggacaaaggaaataaggaaaaagtcaaaagcaaaatatatccacccggaaacaatatatccatatcataaacgccaaaggacagagaagaaaaagaagaaaaggaggaaaaagaagaaaaggcaccgtgtttgtccaagaaagaaagaagaaaagaaaaagatgaaaggaaactccgcaacaaaatcaatcaacaaaggaaaaggattcaagcaaatggggaacctcatgttcatccccgagatcaaaagcaaatattgttacacaatgcaggcgctaaatgcacatggagcgggaagatggaccaagccaaatcccccgagagtaagggagaacagccacagctgcaagggcctcatatgaaaaggaggatgcagcacagacagaaaagtagactcgtgatatcatcaggaaacagtgttcaatattggggcgtgcatcgtcaatgtgtaccgcgacttcatggagacacaatggtggagtggcgacgagacggcgcagggaaggagaaagacgaagactgggaaggagggaaggcaggagaagaaggaacagtcatcggcggagtgggagtgagataggaactgccaaaggactgcgaggtagaactaggcatggagtcatagtagggagcagcgtaggaagactcggagggcatgctagcagcgatctcatcgcaaagaactcgcatgccaggtaggccgttcttcttctggcgtttgtgttcggggaactcgaggacggggccggggctggtgctctcagacttgggggagcggaacatctgctcgtaggacttgagctggaactcaagggcgcggttacggtcagcgaggatctcgttctcggccttagtggccttgagctgttgctgggccgtctggttttgttgctgtagggagctgactagctgctgcagctgcatgcagcgcacctggggctgcagcttctctgagagctgcggtgtgacctgttcctggcggataaggtggacaataatggcaagcatgaagtcaattaggtagatggctccttgcacgatgtgttccttggattgagtaaggctcttggaagggttccagcctgcacgctcaaggaagaaatcgtggatgcggctgtctaactggcggtgcagctcgctgaggttgctgcggcggttgccctcggcgatgcggtgcttctcgcgctggtcatcttcattagattgtgcgctgcccttgcgcttacggccgcagagctgctggagaggcgccttgcggttgaggttctgtggggccactaaagccatgatctcgctctgagacagatcattgggccaatcgaccgagttggacttttgcatggcaaatgactcttgccaggagccttcggcagagttggccggcgaagggggtgtgacgatgtgctccgcagctgcccagggcgacttgaattggaaagtgtcctggggccctggggtagtaggaacaagggcgtccttcacgttgaagggactgaaaggaccgcggggtggcggaggcaaaatttgaggaagaggaggcagtcggcgctcctcaccaacatcagaggcagtcatactggtgctggagctaagagaactttgaatatatgttagggcatgcaggccgataccaggaaagtgaggcaactcacggcagagagcaccggcgggagatatcatcagtagtagaacccatttcttcatacatcgtagttggtcgttgagaaatgcgtgatatgtgcagtgacgagtgtgtcggaagtgattcaaagtatgtcgagaggatatatactgaaagatcacgggtgattcgtgttcttgtgcagattcgggtcgatgagtcgtagattgaatggcgggaagagtgcagataaaacagaagttgtatatgcacagtaatggacaaagtgggcagggctatagacagaatagaaaagaagcagaatcgaaaactacacgaggcgagtgtatacaatgaaacaatggatagaaagggataccatgagggctggggtgcatgtttatatgtcgattgggatggtactttgttccttattcccagattccacctctccggacccaggcgaggggaaccatgtaccagggccgatcctcgacagacatgaagcgcggaatttcggatgtcatacagacagagtgtgcatttccttgccccacagcttcatcacgacggggaagcaagacgggcatcccgggggtgctctggaccacttgctagtgcccgcttgggcccgggaagaagcgccagagaagaaaataattatattcggaattacagagggtatctgtcacatcatgcacagaccgaacctcacataccaatctgttagatcgacgaatgagggggatacgatcaagaccgagagagaggttcatgatgatccaggacccctaatttgtcaccgaactgttgggtgtcgcgatcgacacggggaagattttagtttttttttttagaggcattagggcccttgcatcaataattatcccaattaatgacgttgaaggttgtgtaaacctccgcagaactcatttggctgcgaactgttcgtggggatgaagccaaaaagagggagaaaaagaaaaagaaaaagaaaaagaaaagcactgaacaactaaggtttacttgcatattccacagtatctacgtacatcgccggccatgtccgtactcatcaaatccccacttagattccccaatagatgatgaaacgctcgctgtaacacaagctcagcatgcatttcgatatcctgcatcgatagtcaggagaaacttctatggtcgtgctatactatcaaggggttactcattaccaacgagctaatacccctcgaggcgcttctggtaaatttaaaatttccctaaagtaaatagcatcaagcaaggactgaagtgtcttgatagatgcgaggagctaggcatcaataagaatcaggatcatagttccatataatgaagtgcgaataattggtccacgagcaggaagccataagcgccattgacagttccagcgttaggattgacggcaagtatcattagattggtattcgtctaagcgaatcatcgtaatagtgtcagaaacgacatgatcgaggaaaccagcgagttgggacgagaccccaagaccagggtaaggttcctgtcaggcagcgaatcattagaattagaatgatttggaataagttgacacacagacgttagaaagttgacatatcacattacgtaggtaaagaaatactatattactatatctataatattaactagtgaagccctaaaaaccctaaagatgcacacgttccccgagtggagatagccctatgttgagtctttctttctttattttgcatgtcccttaatctccaaaatatcaaataccctactccgtacgtgcatttaattagatactcatccctggctctttccctgtccctagaagaaccaatggtggtggaaatagagctgtcatattgtgccttcccgtgtcaaccaacagtcaatcagcgtgcctcatggcgactccatccaagacactagtccccacgttctggccgttcgtattcacaatccctattattctactccgtatgttgtactccgtattattctgttattctattatttattgccatgacaaagacccacataaattatgtgcaattctatgcattctactccgtactctgtacgcgagctctacacagagataacctcacctgaatgccccctctttcgtgcattgcagactccaatctgaaactcaattcccaggtttccctgtttccagcatatgcacgcgatcggtggctcacactaaattccacacgcctctgagctatctgcagatggcacgtaccagcaataactcgaggggaaactcactcacgaaccattcgagttcggtcaaactctatacatgattgatccgagagtcccccggaccaatctggaccctgaatagcaatattgaaatctttgggtttcagagatcagagaatagactctggccccgatccctggggccgattctgagggtatcagcgtgggcgcatctaccccataggttacgaggtcgatcgtacctcgcatttcctgtatgaatgccggctgtgtgttcttacggctgtactccctgaatggtccgatgatcatactttcgcccctctttccatacacggcattcgctacaaccttggaagctcggacaggatccccgtcccgtgcggctctcaattgtaaggaataaccgtatacggagtacaatttatgagtatccaatctcccgggtcttctttgcctccacgctgtcattgtaaagcttacagtactctgagcgcccaataaacgtcaccaatggcctcctccctctaaatcattctcaatagtcgccttcccgtgccgccccctgacctgtcaagtttcaactgtcagcgacggggcggggacagtctaattgcggaaatcttattcgaacactatgtattagtgcagatgcgaataacttgactatttgatgatttgagatactaactggaatacttttcggggctgatccttgctacgcgcttaggaacgcctcatgcacgatgcaagatcatcttcgttatttttacttactacttcgtatgcctgtatgcagaaagatgaccaggatcagggattgtaggataatatacccacacgggtctcgagtccatggtacgtgattcgatcagtttcgtcaagtgcaatatcgacctgtctcgctttctggggagaagatctttttttaatcttcgattattattgtcatactccctgtttccacttcaaatcgcccctctcgaattccgtacctacagtgcactactgcgcgtgttgtctccacattggagcgtctagaatttcccgctcgttctactggagtggcgagcacagaaatgcagactcgtgtcagactgatcccacgaaggaaggggctgtgtatcatcttagcctattcgataaagagagctatttgcatgaattgatgagcactgtacagaataccctccccgcccaacagcgttgatagacaataattgtccacctcatacataaggacttttaatatcgaagacggcattagcagcaagggcagacgatcataactgtttctcaaaagccatgtggatctcaatcctagcttcgcgctggacaaagtacaatatcatcttgtaaagtccattgctgattgcccaaataggcagcgagcatctaccgttcagaagtacgtgggagaaaaaaggtcccaaacaacaacaaaagtccaaagttctcaaatccccaatcccaagaacgaacatgccgaaactctctaatcagtgtgggcaggaataaattccccgactggcgcagtcgccaccggctcctgcaaggacaacttcttagtatacagatctagcagacgctcgcggtgcatagtacatatgttgcatggactatttctggaactcaaattcgctgcatctgagaggtcacactcgagggacgcctccgcggtgcacgcatgcatccacatacagcagacatatgctcccccgtggagttcgcgatcgaagcaacatagatactgagtggagttctgtacaacgtaccttttccctctcgttctgttcgtagggatcgtctaggtcgcctggatctggttcctacatggtgcattgccgcaccgattcgcactacggtgcgctcagggcctctgccatttcccattacctggatcgccagttgcctccaatgcaaggcggatgtatatcctggtcggccagacctgaagatttgcatgtttattcaggtccggagtactgagaatccttgtttttattatttttatttctcgtttcggcgacatgcatcatattcgtgcgatttgagtatgagatggcaaagatacagaagcggagttcactgtgggataactccttaccactttgacattgccctgcatattataacaaagtctccacggttagtccgtaatctcgaatgccagctcatttcttgcgctcctctccactttttcagttcttacgtgctgtgtccgggcgggcctgtaggcaagaggagaacattacctacataccacgatggtggttcctcgtattctgctccagtttttgtcttttctcaaggaagaaaagagggtcgatgtccactctcggtgccgtcagaccccacgaagggtctatcttggcagttccccgttcgcatcaaatgccgatgtagatcagggcactaaaaagctgcccaaagtacgagtacgtacaatatacagtatacaacgtctatgaacttcgatacttctatccaatcaggtcatgatcggtgctgctcggctcacattcatggaagatcccgcgaaagtatatttcgcccttatatatccacgattttgacactgagagatcagaatggctgctaatgcttgaaggttttcatacaagggacccgaaactcacagaaacgaaaagaacagaataataaataaataaataagaaaaatagaaagacaccataggcggatcgttatagccgcttcctgttcccaaccctcactgcctttctctttgattctatacagtgatggctctatattctgtcttgtgggttccagctatgcaggcacggtctggagccgatgtaggtcgacacatacggtaatagatgcgagcactcatccaataccccctccacagtcgtcaccactactctatccgatatactatttcgtattagtctaaatggctggattgtctgttccctgtttttcaggacttggagttcgtccctcaagataaggctctagcgaccgtagggctaatgcacagtgatcttcagagcgtaaagatcgccaaatcccctctcccagccacctggatccagctctctgcatgcatatttagtcgcaattaactatgtcgtaatcactagaaccattatcttgtaggcacactgccgtagacgaatatctcaatatacaatatatattccataataattcaatatctactccgtacgtaagtagcatatatataacaatacccaaatccttctatgattggccagtctatcacaacgctcaacgttccagccaccccatatcctctccggataaaggaaccaactaatccgaccaatcacgctatgatttacattcattccccatttcaagctagttacgatcctgatctttcgccttcgggaggggccttcgaatcggattgagcgacgcggcccggcgcggtggattcgacttatcgagttttcccgataatctggattggctcttgactccatttttttggttgtttcggatattttgatgcaagtcgcaggatgatcctgagacgcacatggtagctttactaccgagtatggaggtagccctatattgtggcacgtactatcatcgtatccctagcatgtacgatggttatcttttgacacgtacaacatgacctacctactccgtacttggggagatatttacatcgccacgtagaatagtggtttacgttctccatcgccattgtcttcttgacactatgtagtataactaactctctctggttgactctcaaactaagtcacagtcggggaccaacaatcgcacacatcccgccttacgaaccccgaagatggaacccaacacccattcagtggacgatagggtcccgggaatgactttcctagctccctcccgtcttcagccccctctgcgcggtctagtcccccaatccatgttccttgtctcgatattccatgacccattgaatgccactaaggcacctagtagctagtccggccaaggaagaaaaagaacaacgcatacacttcatccacatggattcgttctacccagatcctgtgtctagcgtctagcgcttactgcatacccaccgggatccactgtctttgtggctggtcagatatgtcctcggattgatgggctttagtggtgggtagtaggtatgtagctagagacgatgtaggtaatatgctgtacttgatacacggggaagttgtgtgtggattgcggatgtgaaggtgggtgctgtgttcgactttcccgtgcgggatttggaaatggagcaggctagattcatgggtctttgcggagatttgactttatggatctggtagaagttgatctgtgtctaagtatcttggaggttagagttgacgcttaagggttgaacatggcgtggctttgttatgagacggcattcgtggatatatctcttgtcgggaagaggcaaacctgcaaagtggttaacgcttcgggctttggtggagtatgggaagccggacgactaatccatggatgtgtctagactatattgacgagcggcagccaagtctgcgaaaacgaatgtctatgggatatgccgaggttcaacgggtcaaagggacgtcgctggctcttccagactaccatgactatagatgtgcaccaagggagctacatttctcgagaacgaatgtcccaggtaaaaagaaaaattaacaattacaatcattatctcgcacgcaactagaataaaagacaatgttacggcattaaaaaagctcaaggaatgtttacacaagaagtacaacgagaaccaagaacccacccacaagcccaaagcagcctcccctcttggtacatcaacagggaacgagcagggtgcaaaatgcaacctaatgcattaggatgtgatgagggaatactggaacatagcaagacaatcaacacacaaaggatgagaaggacccccggggatgcgtctcccgaggtcagaatccgtattgcgaattttctccacgaaagaccgaattattatcgtaacaactgcaatgtggaacgaatattgagctcgttgcttggtagacttttgtacaaaaaaatccccaaggtcatttgaatcctccaccaatcaaccccttacagaagctgggcaagggcaccgaagagagcggcgaggccgacgacggggacgttggcgccggtcatgaaggcagcaccttcgctggtctcggaagaggagtcagagctggaggtgccagatccgcccttggaagtggtggggttggcgttggtggcatcacacttgaagctacccttgatgacatcgtcgttcttcagcttgcggagatcgtcacagctgaagttgccgcgagtgctctgcatgttgaagctaccctcgacatccttgagagcaccaagagaaagcctattcactgttagtatctatgcgaagaccaagatatgggaccaaggacacttacttgttgaaggtaccgctgaagtcaatggcaccgttgacacgctgcagcgcgggcaggctgatggtggagagcttgtcatcgcgggcaatggtgaatccaccatcaacggtcttcaggacgggcatgctgatgttggagagctcggagttgtccttgaagaccaagtcaccggtctgggtcaggttgggagcggagaaggtctcgaacttggtaccccagaagccgagctgaccggtgagcttctcgagggaaggcagagagacagaggagatgttctggaaggtcatgttggtaccggtgcccaagttggggaggtcgacctcgagggtatcgtagttacccgagaagctgatcagatcggtggcgttctggaggttgttgatgttgatggtcctcagatcacggttgttctggatgctgaaggtaccgacggtcttgagagtgataccgttgaggtcattcagaccagtgttggcgatgctgacatcaccagccttagtgacacccttggtgaaggagagggactggagcttaggaagggcctcccagttgatggaaccaacggagtcgagctgggggaagtcgaggagggtcagggtggtgagtccctccaagtcgaaggccttgccgaccgtggtgagagagtcagcgctgatggagctgacgttcgcgccaccggagcaaaccagaccaccggtgatcttcttgacaccgctgagctggagcatgccgctgtaggactcgtcaatcttgacatcaccctcgatggtggagcaggagttgatgccgtcggcatcgctctgggtcttgatcttggtatcaccgcagtcggctgtagaatgacactgttagtgggtgtaccgataatgccaggaacagaatactcacaggcagcgaaaacagcctggctggcagccaggacagggaggatgtacttgagagacatggtagattctaaaccacgagatgtcagcgacgaattttgatcggatttttcaatcaggggtggtgaatgtaccgattagagatatggaaaagctagaggaaaattcgcaatgagtgattagagaagaagcgcttcaaaacgagagagggaagcggaaatactgcgaaaaggcaggaactctcaaaatggggtaagaacgaatggacgaaggttggaggagagcgaaatgaagaggaaggagccttggggcgaggaaaggggaggtggagattgtttgtattctaatcttaccaggtgccactttttcactttatgtatatggcgataccaagggggagaaacacacacagtaccgcatccggcatgtcaccgtgtccagggcagtgccaggtattttaacaccggtttcatactatttcaccactgttaactagaattaccagaattaccagaacactgaaaattaccctcaattaccaaaaaaggaaaaatagaaaaacagaaaaatctcaaaaagctaattaaaaactctcaattcttaaataattccagaccaaccttggaattccctgcttttcagcgctagttcccctttctccatttggttattttgtttactcggtaattcatgattcactatttccatggatgcggaattggagttcacattttgatatgtattgtttacggagtacggagtaatgaaatataggttcatcactttcaaattaggctatgcactcggcaaggtaccctgtacaaattgcaactgatcaggcctcggcatcgtatgaatgatacgtatgtaggtatttgccacagtagattctgtacaaccatacggagtactacaacatatactctttatggagtacaaattcgcagtcttgtagcttcgcttcggtctatcaaaagtacgcaactatcctcggtgtctccgacaacaaaaatcccatgcaaatttatgcccttcgagagcatacagcgttgatacagcaggacctaataagaatgcataaatactagcttgtaacgaaggtccaatcctactagtataatttgacggatcaatcagaagtccactaaccgatttatggccccatcctatcggctgttgtcgtcatcgacggaaccaagctcgagactcgagactcctgttgatcttcagtcttcagttgtacctttgtttctcattggatattactgcatctatatgagacgacacccaacccctatagctattattatacaatatacatcgcaatcgctcaatccttctaacactacggtgtaccggagtactccgtacatatatcaccaattctcccgaagcgctaaacacgcaatgttcaaactttttccaagcttctcactttgatagtggctgatctaaatttgcgggaacccaagccttctatggacccgcctccctgctgccgctatcgtcgattgcccgacatgtgcgacttctgattggcgcattggaattactcgccctggctcactgtcaatcctcgctgtttcccgaaaatacagctctacctgaggcgaaacagtcgccccctcgcgacggcgatatgcaaatgatagcagagaaaggctattcttcagcaccaaaccatgcaattcactccactggcccctattttataggctatgcgcacagcaattggtactagaggtaatttaactatcggagatgaaggtcgatcacaagaacttcgccacacttcctatttgtacccgactagacacataatttcactaggtatacatgcacctgccttgcctatattttacgatatatatagtacagatttaaatcgcaatgatgcagctccaagatgatctcaacgactcgttcatctgaaattttcaattacaacgtaccgacaaatgaaaatttcaaggtctgtgcgttttttggtaacaatgcagaacctataacttcaatgtttggccggcacatctgtagacatctcgatggagctggtcaactaaggcacgacgatcaagcatgtctagagcttcatcggcccaccaaatgtttgatggagattccctcgcatctcgttcttcaagacccaatgggattgacagtgttaaccagtgaaaaactatttactctgaacaactgacatcccatttggggtggcaacaaagtcattattgtcggagacgttacattgtaaagtcgggaaatgtttcagaacggagccaacttagtcgatacgtctcaccccactcatgtatcggtccactaatatgctttttttctttttcgatcgcttagaaacctatcaaagactcggttcattcagatgttatatatattctaccctcgactatggagaatggccgcgttgtcttgcagcaagacccaagttcttccaaatcgcaaaaactcaacatccgctaagcttgaaccttgatacatacttgcccgtgctccttacgccacaaatatggataccgcgacatatttagcctagctctgtgttggaactaaaatagccatctgtcacagtacgaaagaacatgtgtacgaggtacggtgatttcagtgtcgtggcattcaactcgcattccctcctgtctgcccttcatggccgacagactaaccacgcgccggaatgcgtggaacgctcggcaacgggtgtatgcctaactaggggtcgcgaagggccacattccctagcacacgagactatgattgaaaagtaaacatacacaattcgctcgcccgaccactctggggtatgtgtttatatcctaatccggattttatcttggtgcagactggggctgcaatgcgaggcttttcttctagttctcatggtctgttgatttttggggctagtggtcgcacaaacaaggattcactcttgtttcaaaccgatgcacgaacgtcttcggggatttgactcggcccaacgcttcggtctaaatgctaatctctgtttttactggtcgatctgtaattgtattagacgaaccgccgattcgtttccacttttctttttttaatttccttctttgttcgcccggatataacaatcggtcggtgactgggtcaatatatacccgtaggacactagagtgagaacccgagtcctccaggtaatatcaatatagtctaacaatacttctaatacgaaatcacaccgacaaattaactacatccatgttcgatcgttcaagtctttgtccaattcccatgtgaagtctgtattgtattacggagttaccatggatcttcaatttcggtccacggggcgttctttgcggatagtgccaatgttccctggaactgtattacagcggagtatatcgcatccaattgtgtgactttccagtatagatccaaggtacaatcgtcctcataatcgtgccaagcccaccaacacactggtgggcttggcatgattactacgttttttcaaacctgatttgttgatggttaccttatggatacatattttagcgacagtctacattatcattgacacataccatagattttattggttcaactagcccttggaattggttttaaacatccatggattgtacctaggtaactacctaggtaggtacttcatacatctatacatatgtatacattgagatttttctggaaccttcatcaacgtaagtcatagagcttcttgcaatataaaaccgaataatagaagtatcaatgaaccttaacgaaaccatgcagtccacatgacgcgccaaaacacatgcaattatcttctcgcaggtcaagccaagtcataatgagcacatcatgctcattaacagaattttgattctcgagaagttcgagctacgtggataccatagagatgttatatagtgtcctcggcacaacatttcgcttccatgcaatatcaaacaaagatattcagcaacaggtgctcacaatatgaggtacagcagaagctgcgctagggcgcgctcttcacggcagcgcatatgtacaacttatgtatgctgcagacggtccatgatggctacgttaacccgagacgggtaaaccgacattgatgaggattcgagtctgccttacaccattacgctaattgacaataaatcggctgccggaaaaaaagaagaaaaaaaaaagcctatcttgcacgctggcttttggaagcccccagctctagatccctggagatttcaaccttggaaagttttccgcaatattaatcattacaacatcaagtgcgaataatatactttcgatcaccaaacacctgcagtcctgctctcccgcgcctcacggccgaggtcgtcttaaactgcttccaaggttaatgatcggctcgtccttctctcagtccacggctatgcaggatcagtgatgacctgcttttagtccgttcgtagctctagacgaaaatgataaaccatctgttttccagagcctggttcctaatgtcgaactggtcccaacaagaccactacgccaactgttatgtttaaaatgtcaggtcatcaatttataacctcactctttgggttactcacccacctacagacggagtacacacccttgcactccggtaatttccgagatctaggttgtatggtttaccagagcgggacactattctgtagtacctactatctttattatatgagctggagaagatgcgaccctgacccttgggataccgaatgcctagctagcacgtctgttacaacctgcccctggactggcgagttacacactaggccaaaagaccactatatctgagcgttacgctcagatattccaggctccgatatatatagtgcgtgtcgtgacaacgtcgctcatttaaatagtctctttgggaaatcaagatgatcatcgtcttcacctgcaaaatcgtatgtcagaaatcatttagcccactaatagggtatgcaagtcattcatctgatatagcatctccatgtaaatgctgtgcgcttgtatattatcactgccgcgtcgtacattagcaaacctgaccaaagattaaggcacttaaggttctcattgggaggcgaccacaaagggctcccagtctgaccggactgattcttcatggtctaccaccttattggattggattgcgagtgtgactatataaccatgaccaggctctggacatgtataacgtggttaatgcaaatggccctggttgataagtgcccttttgcttagaggagagggactgaaaatattccaatattccgtgcatcgaaagtgcctcacaagtatgcataagaaaaatgaaatcaatcattatatcgagaatgcgctcgtcgatatagttgtccataagcgtcattgcttggcactcgtggggctccaactccgcacctccgcaaaccccagcttcccatacgaccccctcgagacttcctcggattcagtacactgaccattgaaattggactatcccatatactacccaagaatgtcactcagacgctcagcccgactgggttctatcccaaccatcaagacaccattactgcaaagctcagctccgaacgaagcaaccagagtccaaaacagcgcagtgacaaaaccccgcaaggcgcccacaaagtccaagaaattagttaaagaacccacaaagacaaaagcaaacacaggaacctcctattggtccccagagccggcagtcacagagaaacaagaaacagacaaccagccctcaaccactaatcccgcgatattcagacctcagacaccccctcccctcgaccgccctgttgacccgcaccgaacaaatgcaaccctaatcacccctcacggctcaacagtaaacgcctacccagcgcacgcagaagatgcctccccctcgaaaactggccttccacgcccaacggccacaacagggacgctactcgagaaagccactgcgcacctcatagcgatggacccacgcatcgcaacagtaatcgagcggaatccatgtccgctcttctcgcctgccggcttagcagaggaaatcgacccctttaacagcctgaccagcagcatcatcggccagcaagtctctggtgcagcagcaaagtctatcaggaacaagttcctggcactgtttgatttacccgataccgttgcgccggatgggcatagacatgcaaagttcccgacaccagatcaggtcgccaagtgtgatatcgctaccctgcgcacggcggggctgtcgcagcgcaaggcggagtatatccagggccttgcggagaagtttgccagtggagagcttggggcaaggatgttggcgcgggctactgatgaagaactttttgagaagcttattgctgttcgtggattggggaggtggtcggttgagatgtttgctatgtttgcgctcaagcgcattgacgtgttttctactggagatttgggagtacagtaagttcatttcttgctgttgttccgtacaaattcttggacttgtggcctgacacctttgtagacgaggctgtgctgcctttatgggtcgtgatgtgagcaaactcaagggcaagggtggtggtaagttcaaatatatggccgaaaaggatatgctggaacttgctgccaagtttgcaccgtacaggtacgtgtgaccctgttcatggtgtagacaacgtgcttacctcgttgatccaggagtctatttatgtggtatatgtggcggattgaggatgttgatgtgactattcttggtggttaaaggtcgtagatgtactacctccgcgagtcaggctgcccgcataccgtgtggtttattggacgttgagcatttgagataatgttgtggtatatatgtcgccgtagtagatagttaatatttggaagtgaattgtggatctgtcttcgcagccgctagaagaggggttataatcgaagatgttatacatgcgcagccagaagttgggcgcctaacgcccaaagcgatcagctgagctgccataacccgcataagctacctaggtaggggtcccgaacagacccagtcactactaaaggttacgaggcaataagaaggcaggacctgcctgtcttgtcggttacaagattgaccaaagatataagcgcgcgaagaaaatcgatttgtacagtatcagtacactcaggctgcgtaaccaagccatgggtcgccgatgacggcgaccattcaattacgaagaaagcacaccaggcgtttatccaatgacaataacaatgctaccccaacccccctgttttcatattctattgaatcaagcagcaacggcttacttgcgaacaacaaggttgtcaaggtcagcacgctccttagcctccttctcgacctcgcggatgatggggctcaggtactcgacgtcctgtttgattcgcattgttagcattgtgttcgttgtggtgagtagatatccccaaacgaagtcggggtggaaatgacaaatcggtgcaacaggattggccgatggagacccatgcggggagcgcgaaatttggatgttggggactcacctcagagggcttggtctgctcgtgggcgggaaggagagtgtgggagatggagcactgcaattgacatattggttaggtttcgcgccagtcgaatacgggggaaggggccagtcgaacctggaaagcacggcggatacggaagacacggtcataggcctccttggcgggaagacgcttgatggccttctggacattctcgctctcctcagggatcaagtcatcgaacctagttgtgaagttagcaggtgtttctgtccaaccctgccacgaacgatatccgaaagaccggggctccaggcaaattcgacgcaaccgcgatcccattcaaaagatgtgccaccggtgcgcgacgaattcgaccagccaattcccagcattgtctcaatcgctcttggtcgggatgttatcgatataggagggcaagaattacttgagtccgagtctcctgtagccggcggcatcggtgtaccagtgggagaggggggtgagccagctcttgagccatgggcgcttgacgatgtaactggcgagcgaaggggcagacattttgaatcccgggtatcccaattgacgtgggtgtggtggagggttgaaaggctatccgactggaacacgagatgacccgatgttgcgaggttgtgcaaaacggagctcgggcgactaggcccgaaacggcagctctacgcctgaggccagaagcacgtgacaatttcgtgcctcaggcggcagagaaactgggaatgtctatcggcgcactccactgagcagatgggtttcctatgtcatatccccttttcgatcttatcgcttgctttgacagaaattggatttgctaattgctgaagcaactactgatccctgctcacggcaagaagcttgattgttctgagaaccccgcccacgtccgtgctgcaagatattagcacattgcgcattcaaaccaaccactccgggttcggcaaccatcggccccaaaaaactctcactctctccttcgtctttacttaggactttttacttacgccatctacggaccttgggctttggatatttggataaatctacatttctttcccagctcggtttgaaatagggttcttgggttccggatcgagcacccgatatgctcgtgtccgggagccctcgttgattcagtacggttcgacaagctgcgtgagcgccggccaccaagatgactacaaacggccgaagcgctccaagcagctcccaaaaccaaactcaatcaatccatgtcgacaattcccccaacgtgcccgccgcaccgatctctgatttaaaaacccgcctcgagatcttttccaccaagatacccaacttctacatagcacctttctgcggagccagcgctggcgtggcctctggtattgtcacatgtcctcttgatgtcatcaaaacgaagcttcaagcccagggcggctttcggcggggagcaaaggaagttgcctcgggggtgctgtatcgcggcatgctcggtagtggaaggagaatttggcgggaagatggaattcgcggtctctatcaaggtctaggtccaatgttgctgggatatctccccacctgggctgtctacctagcagtctatgaccggagtcgtgaatatttccatgacaagacaggtaggtacctccagaccgaaggatccggtcatccatcagtactgactaagtacaggaagctggtggttatcccgcggctatgcttcaatcacagccggtgcatgctcaacggttgtaacgaaccccatttgggtcatcaagaccaggctcatgtcacaaagccttaaacaaaacagcgaaggagtacgagccccttggcaatactcggggacatgggatgctgctcgcaagatgtatcaaatcgagggcattcgctccttctactctggcctcaccccggctctgctgggactgacccatgtggctattcaattccctctctacgaatatttaaagatggcgttcacaggctatagtatcggtgagcaccccgataccggtagctcacactgggtgggaatatccgttgccactttcctcagcaaggtctgtgcaagcacagtcacatatcctcacgaggtcttgcggacccgactccaaacacagcaacggactgttccggcacaatctcacgaagagattgcattccgcggcggattgaaccatccacatgaccgcggccggtcgggtggcatgtcctcatcagatggaatgcgcggccgcccacgctatagtggcatggtacgcaccttccagacaatcctcaaggaagagggatggcgtgcattttactccggaatcggcgtaaacctgttccgggccgttccggctgccatgacgactatgctcacctacgaatacctgcggaagcagatcaataccttgcagcatgaaggtgcgcataagatcaagatggaagaagaagctcatggatctatttgatacccacaatatatcagcatacaagagactatctccaatctccaacctcacccttcatatctgcttcttctaaaacatcgcaccccaccgcttctgatcgccgaatctttcttttcctttcgtcacaacctgtatagacatggacgaggtggtctgtgactcggtatttgcagatgaatcttttgcgagtaaattttggctactgcattctgagcgcatacaagggtctcggcataggtgacagtgtctccagcctccaaatctctgacatgtgaaacaactttcacatgtattcacatgctcgctgcatcttatctgaagaattacttgcccttccttattgatttctaaacttgtctaccgtctttctggcttctgcatgtgtttcctgtatatacatcacttgttctgcatgctcgccctttctcgtgaatacacatttcgaataaagcaatggctttcagatcttatctggaaagacgcacatatctcaattggaaaggataccttgaatgggagggataacttatatatgccaaaacactgggccttggaggccggctttcaacttgatgctgatataggttgtatagaatgtagttgaacatatggggcagtcacgtgacacgctatttaaaactgcccgcgattattttttccctctttcttttccgcttctttcttcatcactttttttttttttcatcaatcagtacttgttcctcaaggtgtttaatgctggcactttgaggatcaattcacagatcagtctcagatattgatttttgtcaggttcacttactaaccactttcaactgccccccaggtgcctgggcaacctgactgcatcaaactaataaccccccattcgcttttgtggccatttgattcattggtctattgaaaggcaggatgtgtctgtccagtcttatgtcatcccttgtatacagtcctacaacctgcgatacccttggcctcatcacatattccttcactattcgcatgatgaacaatttcaagattgaactgggttgtcaatacacttagactcctggggcatgatcattcatacactgaaaattctgattgaatatgaagacgcagatgttactgccagttggttctgctttcctttcaccttctatattagcaacaaagagtctcaaatgaacaaagaattagtacatgttggtgtcacaaattatctatcaaacactgttgtagtggattcaatccatattatatacatgaggaaagacaccttgcagcatagactgcacctcaaggtcgtcccttcccatcgttctgcgctcgactctcttcaagtgcttgttgaacccaggactcgtctttcctctcagatggtgtagctcgctgataagaactggggccttggatttgagcatctcgccgtgcagtacggatggagctaaagcagtatgaacaaaggatgacagccattgtaaaagctgcaataggagcattgagggactagaccaagatcggtacatcagtacgtggaacaaatggagaattagtcaaaagaatcaagtctgttttgattggtctttgaaatgcattgtacatacccctcttggcttgcctaatgctttaggattctgactctgttgggtcatcgcggtgactttgatctaagcttaagctatcctcaaaggaagctatcctcaggttcacctttgccggcctaactaaacagaggcaaacttctctccacaaagggcacacttgagcagaattaaaaattattgagagaagaacacgcataagcgacctcgggaggaataggccaggatgacaaaagtgctggttcaacttgaaaagtggggaggcggagagttgagcggagagataaaagccttatcgcgttaatcgatgccgacgttctcaggccgtcgacacaccttgggagactctttcttaccaaacaaccatggcttctgatccccctccaaaaaggggcatgtccctctatgccaatttacttgacccgtctactgatgcgcctggtaccatctcccgtgcacctgttgtttttaagcagccggagactgaatctcaacccgacgacgcggccgccaaaaagcaacaactgaaccctggtatttacccttagcttgttggatactccggagcggcacattctgaccttcacatttcttcatagcttctcttcggttccaaccacccaaaagaccacagctctcagcccagaaacctaaaccgagacatactttaccaaaggcaatgtctcaaccacagccctccgccaaccaagcttcggtgccgacaaagagcactttggctgattggaccgccgttgacgatgatgggtatgagtacacgcgcgagaagcgacagcgcggtggaagaaagaaacgcaagaagaactttgaaacacaagttgcccaaaactgggacgatatctacgacccttctcgaccgaccaattatgcggaataccgccatagtgatgagcagattgctgaaatccgcgagtggaaggatctcttgtatgcgcataccagaaggcgttcaccgagcagatattccgacggcgaggatgatgaccggccaaggaagagtatgttcctgtcttttgcgattagtgatgatgcccagactaaaaagataccacaggacaatttgcgcctccgagcaactttgcgccgccgccgaatcttaacgatgtgccaccaccagcttctatccccaatgacccatccggtgaggatgcatttgctcgccgcgcagcattaggggaactcccgtcacccgcagcccgaactggagataatactccaattcccgatgatcccactggcgatgatgcgtatatgcgccacttccagaaagccgagaatccaccatcaggacaagtcataccacctcctccaccctcacgtccccttgatgccatccaacctagctccgcaactatctcccgtgcaccggtccggtacgctcttcccccgcccccagaaggcatcccggccaccgaaaccgaacttgaagctgtattggcccaagagcaaccggcggatgagggggagccagatgagtccgcgccgcgatcccttcgtccggggcaacaaggcttcgcagaacgactactttctaagtatggctggactaagggttctggcctcggcgctactggttctggtatggtaaagcccctggaagtcaagattgagaagcgaaagaagcgaccagattcagagggcggtgggtttatcactcccgctggacgaggtaagatcatcggaagcaataagaagggtgaatatgagaccagcaagtttggccctatgagccaagttgtcatcctacagggcatgctgcaaggcatggacctggatgcggagatagagcgaagtgatggtggtggtttggtccaggagattggaggggagtgtaacgaaaaggtgtgtttcttttcatcgattggcttggggggcttttgctaactttaggggctcacagtatggaaccgtggagcgagtcttcattgctcgcgacgtgggaaccccagtccctgtctttgtcaaatttagggaccccttgtctggtctacgggtaagcctttaggatctacagcttgattcaagtttggggttgtgcattgctgaccattgcatatacataggccgtgaacgcgctcgaaggccgggtcttcaatggtaacacaatcaccgcacgatttttcgatctcgagaagttcgaacaggggatttacacagtctaattgcccgtgtccctgccatttcatgtagctatgacatctcgataatttgttcatttgtgcattctcgactattgcacatacaataggccgtgaatgtctcgaaggccaggtactgaatggcagcaaagtcatagcacagcttttttgactgaggagtttgaccgggggcttacatggccaattgcttttgttcatacccctttgatgtacttagctatgttaatgataatgttcgattttgtttgatgttgctgtagtgaactctcattgcaatgtaaatactatctctaaatgtaaaggaaaatgcaggctatgggatatctcgactgtagatcatctaatcccctaggaacctccaaaattccgatcgaaaacctccatcccattacactaatccatcaatctattgccccgacaccttcttaacaggaagtggaatccaggagcgccaagtccggcgacactttctcgacttagaagcgcgaagcaaaggctctctatctggcatatcgtcatcagtgataaacgccagataagtacgattctgcgggttgcgcaccaacctagtagggagaggaatcatagaccgccagctccgacccgtttggggctgaggctcttcatcttcatcatctgcgtaatcatcagtatgttcaaccaaagcaacacaagacaagtgaggcgaggacagttgcactagggtcggcatgtgtgccggaccactacataacgacgtacgggtctccctgttctcagctcgctgagcaaaacacctctgagtcaagtttggaaactgggagacccatgtttccatatccaattcttcagcgtcgttgtcatcgatggcccagccatcttcgtcgctatactggaatgcatggtttaacgccgatacaagatcttctctccgccattcgcggaagacacggtggcgtagcagtagctgattaatcttgcattgcacacaattccctacgagtgagaaatacaatgtgcttcggtcttctgtgcactcgtagccccttcggaaggctccgtggcatgcgattgagtagctcgcatcagggcattggtgctggcatagggcatggtaccagataattgaatgacacatgctgatagatgatggtatgtatgtagctttccaaggtcgggatttgatttgtaaattttgctgatagtttgcttgagggttggtgagtgaggatgagagtatgccagatgaaacgggaagatcttcctttatacgcctcagaccagaatcaaagtgtgttggcatctgccgacaaacttttgttgttggaaagagcctttgtcgaggatcaatccgggctcgaataaagaaccattttctcgctgcagcccttcgccgttattgttgatacagggcattgtagaccctgttgggctctttgttggcttggagaggtatatgaatgcctttgttcataattttgccggccaaggtcataagttatattttgcctagcgtagtggttggaaggaagcacatttgaaattgtaattacaagtggaatatccgggacttgggttgtatcaggtagggttgacctgaatccatagcgccgttgatatgaatatctcgatgggttatcatcagccaaatagtgaatacagctgactagcttgccatgatccaaaggggggtgcggttaacactcccctttaattaaccttggaagagattatcagcacgggtatatttcatatacaaggtcacattttttagatcaagttacaacgccctgggtatatctgtgtgctccctaaacgtagcctaagtacatacctaggtaggtaggtagtactcggtcttaataataataactaggggattgatataggatgataccagatacctgcaatttgtaggcaaacacaatgtaaaaataagtcacttttgtcagcacctctactcagcaccatacctatactagcactgtacaccgtacccagcagcgtatccagcaccatacctagcaccgaggcctaagacgcgaatgcggacgtgcaaggggccaaaaaagcgcgtctcgagggtgaaaaggatgaacaacaatatattgagtacaccaaggcttagtattgagtccaccaattcttaattcgacagaaatgtacgatttttcctgatcaaagtgcatgtctttttactatataaaccggaattcctatagtggtggcagaattatatggcagaaaactctgcacaggcagaaggcatggcagaatccccagtcgcacccgattaggaaggcagtagtgtttgatacctaattttcaggccggggggtgtggttatatcaatccccgaataatatatgctcggtgagcacccggacccgtggactcccagggttagatcaaaatgcttaggggttgcacttgtaatatatagccacatagaatatatgaaagaaagaatatctcatagaaccagttgtaattgttatttatgcctaacaatagaagtgaggctccttgggaggttcctggacaaggtcgggccggtccttagtaggtattacataagcaaggtcattccaaggttgttcgcgtggggaggtcaattgctatcacctccccggctttgacgattgccacctttagaatcttccgctcatcacctcacctctttctccccctccccttacccatcaccaactaccggtcgtcctctgcttatttgcagtcaagttgtatctttctactgcttgatcttctaccaccttctgcgaggcagcccgtttcagctactcacccgctgagcactacccaagatgtcgttgtgccagaaccgtcttcaagaagagcggtacgtacatttcttgtccagcggattccgcgattctgcgcatcgcttgcgccatacccttgccccgcgctgacctttatggtttctctagaaagcaatggcgtcgcgaccacccttttggttttgtcgcaaagccgaaacgtgccccgcagggtggccttgacctgaagaactgggaatgcgctattccaggcaaggctaacactctctgggaaggtggactcttcaaacttgacttgatcttccccgatggtgagtggcgcaacattcatgactattgaagatccttatactaatctaggttctttcacgcttctagaatatcctaccaagcctcccaaatgtatgtattcccttcgcgatataatcctgcggcaattcgccagaagagagcttctgctaggagctgtcaccatgatttcttatgacgacaaaacactaatataagaactgttcaggcaaatttacgccagcactattccatcccaatgtttacccttccggaacggtttgtctatcaattctgaatgaggaggagggttggcgacctgctatcactattaagcagcttttgcttggcatccaagatcttctggatgacccgaaccccgagtcacctgcgcaggctgaggcctacaacctcttcaagaaggaccgtcctcaatacgaacgcagggttcgcatggttgtcagggaaaaccagcccaattaggaaactagcctaatcaggctttgacttacacaagcgtaaacagcgatggcgctgcatgggtcatttacttttctttttctctctttcagcatgggatacagggaaattgtggcaagattatgcatttcttgtttaacgaagggagcaacttttgcttttctatcgcgagcatggcgttttctgggcttaaggtcattgaaaaacaatgatactgcatacatgctccctgctgggatgcttagacttgccatgtattgagttcagggtgactcagaagaaattcgatgtcgtacttatttgcttctatgcatagataagaccactcgggcagccaacacaacttccatccatgcccttcttcgcagatggaatgagcccatggtgggtgtctttggaagctggatccaacttgcacttttcatcaataagacaccaatccgggaaccttcaaaaacatcttgcaacccttgtgggccccgcatagatcttgatggcctcaatatcgagacaggtgtgtcgcctttatgataagactgacttggcttcacattccatttgatatttattatcagtttccttgaacagacatcgaggtacacttcctcgaggaagaggcttggctagggctatagttcacatggtgggggtataatagtcacgtgatggtaatcagctcattctccaggggtcgcctatgttgtatcagactgagatggacgagtatacatatgtaaatatccatggatgacccattgcaagagtcctcggatatagccgcatacctagccacagtaaagagtagtaaaacccttacttaggcagtagagaatagtccaaagggccgttatcttatcggtgactcaaaagacttgccgacatcgcccctcgcccccgccgagacggcaccggggcaaatttggaaaaaaaatcgccgttctatggttccccatataaccggacgattagtcaattccactccggaacccttcttctctctcctctttgatcttcaatcttacccacacttcttcaattgcccatcatgtgtggaattttcgcgtgccaccagttcgtcttgtcctagtcttagctccccgcgcctggtgggatgtcaatttgcagaatactaactagaagtcctacagtcaccccgatgtgcaaaagttcaagcctacggctttgcgcatggccaaggcgtgagtacctctactgtcccttcaattgcggaaatctgcaattgcaattcccgatctacaggattctcgctgacttgtccctgatcatagtgtgcgccaccgcggtcccgattggagtgagtcacaggccgagttgcaacatttcgcagtatatgtgaggatcatagggttaacaaaagtcttccaacaggtggaaacttctgcgccgagagcactagtgagttgacacgcaatgattttggtgtcggcgtggtatgctaacgcgcgattcatagtcctggctcacgagcgtctgagcatcgtcggtgttggtatgtggccccctgtgaacgaccaacaacttgaagatctatatgctaacaatatcctctcagactccggtgcccagcccctcgtcaacgatgacagcagcctcgccctcgccgtcaacggtgagatctacaaccaccgcctcattcgcaagaacctccaccacaagtacaacttcaagacgcactctgattgcgaagttatcattcccttggtatgtcacacgcgatacagcggaatcggacaaggagtctaaatgctgatatatactagtatgaggagtatggccttgatgcccctaagcaccttgatggcatgttctcttgggttctttgggataagaagcaggaccgtgttgttgctgctcgtgaccccattggtatcaccagcttctaccttggacgctcttcctccactcccggcgccgtcttctttgcctctgagctcaagtgcctgcaccccgtctgtgacaacatcattgccttccccccgggccacgtctatgattccaagaccgacagcttgacccgctacttcgagcccaagtggtgggaccccaccaacgtccccacgacccccgttgactataaggtggtccgccagagtctcgagaaggccgtccgcaagcgtctgatggctgaggttccctacggtgttttgctgtctggtggtctggactccagcttggtcgcgtctatcgcccagcgtgagaccctccgcatggccgaagcagcccgcaaagctccccagaacctgaatgccgacggtgagttggttggcattgatgacgagaacgacctgtcgactgtcaccaccttccagcagctgcactcattctccatcggccttcctggtgcccccgataccgaggctgcccttgaggttgccaagttccttggcaccaagcaccacccgttcaccttcactgttgaggacggcctcgatgctctctctgacgttatctaccacctcgagacctacgatgtgaccaccatccgtgcctctactcccatgtacctgctgtcccgtaagatcaaggccatgggtgtcaagatggttttgagtggtgagggttccgacgagatcttcggtggctacctctacttccacgccgcccccaacaaggaggagctccacaaggagaccgtccgccgtgttaagaacttgcacttggctgactgccttcgtgccaacaagtccacctccgcatggggtcttgaggctcgtgttcctttcctcgacaaggagttcctcgagacctgcatgggtgttgacccccaggacaagatgatcacccccgagcgtatcgagaagcacatgctgcgcaaggccttcgacacctccgatgagcctgaaaccgctgcctacttgcccgataaaattctctggcgccagaaggagcagttcagcgatggcgttggctacagctggattgatggcctgaaggatgaggccgagcgccaggtcaccgatgagatgatgaagaaccctaagcccgaatggggtactgacgttcccgacaccaaggaggcgtatgttttcgcttgtttctcccattttatagtactgttgaaaactaacctggggtatagatactggtaccgtaccatgttcgatgagcacttccctccttactgtgccggcactgtcgagcgctggacccctacctggtccaagcagaccgaccccagtggaaggtgagctattgcttattctattctcctatttgggtcattttctctaaccatcctttgcagagccatcgccatccacaaccagaagtatgacaaggagtaaaaagccttgagagcatataaacaaaaagatctggactttgttttctgatttagcattttcttttgggggatataacaccggattagattttatatacccttttcttttggtatatagtcggtataattgttatgatctcaatatttttactttgtattgacgtaaacacgtgacctgccctgcccaaacattgccggcgggctttcccggcagccgggcaaccgccaatcaccgacctcccactaacccgtgctaagcccctaggttccccccaacatcatcacaactcttcctttccttcctctctcttcatctcttcataaaacctcctttcctccatctctaattccactctctcgtcaatatgtctgcccccgctgctttctctgatatcgccaaggcgaccaacgatgtacgcaaaactgttgggaacaaaactcagaaccttggctaacacccgattccaatagctcctgaacaaggatttctaccacggcgctgccggttcgtctatccaccacattgcgccagtaattgaagattcaatagctgattgaaagattttagccaaccttgaggtcaagtccaaggcccccaacggtgtcaccttcaccgttaagggcaagtctgctcacgagggccccattgctggtcaggtacgttgaatataatttccgaatccgctattgcaaattactaactgttgtctatagctcgaggccaaatatgttgatgcgcccactggtaaaggccccctccacaaaaaacctcccgaccccggcgcgcacacagcccgtctcatgccattgatgtttggatgtggtgttccaatagcgcgccggacgaacctatttattttttcggatgccaaggtgcaaaggattaggctaatatgctcactccgaccaggcctcaccctcacccaggcttggaccaccgccaacgccctcgacaccaagctcgagctcgacaacaacatcgccaagggcctcaaggctgagatcctcacccagtaccagcccgctaagcagtccaagggtgccaagctcaacctgtacttcaagcagcccaacctgaacgcccgtgccttcttcgatctcctgaacggccccaccgccaacttcgacgccgttctcggccacgagggcttcctcgtcggtgctgagggtggctacgacgtcaacaaggccgccatcaccaagtactctgctgccgtcggctacagcgttgcccagtactccgctgccatcaccgccagcaacaacctgtccctcttctccgccagctactaccaccgcgtcaacgcccaggtcgaggccggtgccaaggcttcttgggactccacctccggcaacgccgtcggcctcgaggtcgccagcaagtaccgcctggacccctcttccttcgccaaggttagttttacgtccttggattgcttcttatcgctgttatggattacgactaatcgcgtgattttctcgcaatataggctaagatcaacgaccgtggtattgccgctctggcttacaacgtcctgctccgccctggtgtcaccctcggcctcggtgcttccttcgatacccagaacctgaaccaggctgcccacaaggtcggcgccagcttcaccttcgaggcttaagcgtctggattttaatcctttcagaaacctaacagatgaactaccatcttttgggaagatctttgtaaacttcaattactagttcacttgtcttgctgattcgccagaacgatgattatggtggggtttcgtccaagataataaccatgtgcgtgtgtcgtagatctttctgctcgatcaccctttgtatatcaaatccaactttttcctttgttgatcagtctgatcgattcataatatctacaaagcaccggggagtgtgctcgtagccatacaagagttagtgtacatcaaccagcaatgtatttgaacctatgtacataccaagaaactacatgtacaggtatccaaggatgtatgtgtggaacagtctagcacaactccatcaagaagacaaagcctccctctgcttcttcgtcttcttcccatcaacagccttcggaaccgaccgccaaagatccacgacaacaagcatcacaatcaaacacccggaacaaagaaagaaccttgaaatcgtctggtcaaccccaggctcacgctcaaccctctcctcctccatcctcctagcgcccctcctcctctccctcctcctccgatcctccgccgcctgtgtccggaaatgtccctgcgcattaaaatgatgcaacggattccgatgaataaacccctcccaatcctccggatcagcatgtttcgtcccagcgcccgcgccagctcgaaattccgaccccgcagcaccaccagccgcccacccctgcccctgtctccccgtgccgccgtatccaccctgctcgtagaaactaggcggcggaccacggaatgccgagcgccgcttgctcagcccgctggcgggtcgtgagccggcgtagctgctgtggctgcccatcgggcgttggtgggtgtgggtttggccgggcgaggtatgctgcgcggtatggaagccgtggtcgcggtcgtagactgcgcgcttggaggcattgccgaggacgttgtaggcggcggaaatgcgggcgaagcgttggcttgcgtctgggtctgtgcggttgcggtctgggtggtggcgcattgagagggcgtagaattgtctagggttggatatgtaagtattggagatacatgtggtttggagatgcaggggtggagggggagggagacatgttgagtgtgggtttgggcgtacttcttgatctccgctgctgatgcggttgtcgggacgtcgaggatttcgtagaagtttgcttcgcgggcttgggcggggttgctggttgagaaaagggatatatttggcctcgag
